United States Patent Application Publication US 2016/0078168 A1 - sequence listing, part 11

SEQ ID NO: 237136 - RNA, 92 nt, Homo sapiens
gcggggcgcccccgccacgcagccggccaccgccgagacccagcacacgccgaccagaccggaccgcacaagcagcagcagcggcaccaagc

SEQ ID NO: 237137 - RNA, 99 nt, Homo sapiens
aacacgcgggcagcgaacaagcgggagcaaggagggcgaagagcgaggagacagcccaccgaggaagaccaaaggaccaaccaacaagaagcacaggcc

SEQ ID NO: 237138 - RNA, 78 nt, Homo sapiens
gaagaagccggcccggggccgcggacgaggaccagcagaggccagcacgagaacccagaggccgggaagaaggaggga

SEQ ID NO: 237139 - RNA, 75 nt, Homo sapiens
caaggaagccacggcagacacacaacccgacccgacgagcgaacaagaggcgccagcgggcgcgccggaagaaca

SEQ ID NO: 237140 - RNA, 81 nt, Homo sapiens
ccgccagggcggcgccccgggacccgcaggaagagaaggagacacacaagggaaagaggaagaacccggacagggaccgaa

SEQ ID NO: 237141 - RNA, 75 nt, Homo sapiens
gcggggagacacggcaaagggccaccagaaccagcaggcgaagacgcaggagagcacagacggacccgcacgacc

SEQ ID NO: 237142 - RNA, 75 nt, Homo sapiens
agcgagcgagggggggcgcgccggaaaccggagcgcgcagcagggagaaagaagagagaccagaaacgagaggag

SEQ ID NO: 237143 - RNA, 76 nt, Homo sapiens
gaccgcaggacaccgggaccgggggcgcagcaccggaaaagccaagaaagacccaaaagaccccagaccagaaaga

SEQ ID NO: 237144 - RNA, 74 nt, Homo sapiens
agccccgcaacgaagcggccccagcccgaaagcaaccgggcgcaggccacagaaaaaagcgaacgcaaggggcc

SEQ ID NO: 237145 - RNA, 44 nt, Homo sapiens
cccagcccacagggcagcacggaagcggagaagccgagagaagg

SEQ ID NO: 237146 - RNA, 79 nt, Homo sapiens
gacgacgagacgacaccacaaagccgcgccaggcccagacacgcagaggagacccgaaccggcaacagcaccggaggcc

SEQ ID NO: 237147 - RNA, 64 nt, Homo sapiens
gcggacccgggggcgcccccggacgcggcagacggagccgagccacgcggagcgccgggggccc

SEQ ID NO: 237148 - RNA, 75 nt, Homo sapiens
accaagagggggaacaggcccacacggaaagagaaaagccacacgcagcggccgaggcaggggaagagagcggcc

SEQ ID NO: 237149 - RNA, 80 nt, Homo sapiens
agcagccaggccaggagaggaaccaaacgccaacaggggccggaacacccagggaggacagcagccgcccgggaggaggc

SEQ ID NO: 237150 - RNA, 69 nt, Homo sapiens
cacgcaacagagccaggaaaagaccagaacagaccacggaagcaaccaccgaaacgggcgaaaaagaag

SEQ ID NO: 237151 - RNA, 82 nt, Homo sapiens
aaaccccaccccgcggccccacggcccgccaagagccagcgccggccgcccgcaggacaccgagggcccagccgcgcaccag

SEQ ID NO: 237152 - RNA, 76 nt, Homo sapiens
agaagcggaacagccacagcagcccccaaggagcgcaaggaacccgggcggggccggacggggggagaaggaaaag

SEQ ID NO: 237153 - RNA, 58 nt, Homo sapiens
aaaaaccccccccgagagacacgggcaggaaggggcaaaagcagaccggaaaacccac

SEQ ID NO: 237154 - RNA, 75 nt, Homo sapiens
gccaagaccaaagccacccaaaaagagcaaacaaccggggcagacaacagagacaccaagcaacggcaacacacc

SEQ ID NO: 237155 - RNA, 78 nt, Homo sapiens
gcagaacaccgacaacggcggagagaccccgcggcgggcgcacaccacgccggcggagcagagcaggacagggaacga

SEQ ID NO: 237156 - RNA, 100 nt, Homo sapiens
agagaggcggggcgcccccgccacgcagccggccaccgccgagacccagcacacgccgaccaggacagagcgggagccaccagcgccaaagggaagccag

SEQ ID NO: 237157 - RNA, 72 nt, Homo sapiens
ccgagggccaggaggcgcaagagggccaaagaaacaccaacagaaggaaaaaaggagaaaaaggaaaaagag

SEQ ID NO: 237158 - RNA, 57 nt, Homo sapiens
aaggacggcccgccaggggcggaggacacacgacagacaacaacaggcaggacccca

SEQ ID NO: 237159 - RNA, 64 nt, Homo sapiens
cgggcgaagcgacgagccgcgaggagaagaacggaccgaagccaaagaacaagagcgcagggac

SEQ ID NO: 237160 - RNA, 85 nt, Homo sapiens
ccaagcaaacgcagaaggacgcccacgagcaaccaagagacaaagaggccaggagacacgccaccgccggcggcccccggccagg

SEQ ID NO: 237161 - RNA, 97 nt, Homo sapiens
gcagaagaggagacacaccccgagcccaaaggccggaccggaaggacagggaacaaaggcagagaaacgcaccccagagcaggacacaagacaaaac

SEQ ID NO: 237162 - RNA, 86 nt, Homo sapiens
cacggaccaaaggccgggcgcagaacccccagaccacaaccccaagaagaagcggaagaggagccgcggaaccaagacacaaggaa

SEQ ID NO: 237163 - RNA, 69 nt, Homo sapiens
cacgggccaaaggccgccacacagcaggcgaaaagaagaggcgggaaacgcccaggacaaacccagacc

SEQ ID NO: 237164 - RNA, 67 nt, Homo sapiens
cgggcggagggcacaccagagggggaagcagacggaaagcaagacaggaagaacgaaggagccgcac

SEQ ID NO: 237165 - RNA, 83 nt, Homo sapiens
acaaacccagcgcacccgcggccgaagccccgccccgacaaacgaaggcccgaaaaccagacgagagacagaagacgaaaggg

SEQ ID NO: 237166 - RNA, 38 nt, Homo sapiens
cacccaccacacaacaaagaccaggcagaggagaagcg

SEQ ID NO: 237167 - RNA, 78 nt, Homo sapiens
ccgggcacaccgggccggcggcgcaggagggagccggaagcgaagaaacaggggagaaaccccgcggggaagccgagg

SEQ ID NO: 237168 - RNA, 78 nt, Homo sapiens
ccggagcagcccgccacgccggggccaggcagagaagaggcgaggcggcgaggcacccggcgcccggcgcgcccgcgc

SEQ ID NO: 237169 - RNA, 72 nt, Homo sapiens
gacaaaagggccaaagaagggagagagaacgggcaccccgggcggaaaagagggaaggcgacaccccagaac

SEQ ID NO: 237170 - RNA, 83 nt, Homo sapiens
cggaaggcggcgccgcgacgcagcgcacgcagggggcgacggggcgcagggggcgcagccaaacagaggaaagagcggagccc

SEQ ID NO: 237171 - RNA, 68 nt, Homo sapiens
ccagcggacacggccgccgggccgcgcccacgggcagcgagaaccagagagaaccaggaccaaagaaa

SEQ ID NO: 237172 - RNA, 70 nt, Homo sapiens
ggaagccgaaggcagccacagggacaacggaagacaaggcaacagaagacaaccccggacgaaccagggc

SEQ ID NO: 237173 - RNA, 78 nt, Homo sapiens
aggaggcgagaaccagagaaagaccgaccacaaacgggcaggagcagaaggcaagaaagggagaagccagaaaagcag

SEQ ID NO: 237174 - RNA, 86 nt, Homo sapiens
gccagcccaaacaggcggcacaggcgcacaggaggcggcacgcagacggaaggagaccgaaccgccacgcgaggagagccacccaa

SEQ ID NO: 237175 - RNA, 53 nt, Homo sapiens
gcagaaacgcaccaggccaaagaaagagaacgccaaggggcgaagaccaagac

SEQ ID NO: 237176 - RNA, 76 nt, Homo sapiens
gcggacacagcaacaaagagagaaacagcagcaacagaaaaaggagagacaaagcgaaagaaacccgcacagaggg

SEQ ID NO: 237177 - RNA, 59 nt, Homo sapiens
ggcgggccgcgggaggacaccacccacagggaagcgaccacaaaaacagagaggagccg

SEQ ID NO: 237178 - RNA, 84 nt, Homo sapiens
aagaaccggggagcgacagaagacaaacagcaaggggcaaagcagacgacccagacaccaaggcaacacggacagggagaagaa

SEQ ID NO: 237179 - RNA, 71 nt, Homo sapiens
gccaggggaccaggacggggaaggaagggcacgggcagaaacagagcgaagcggcggcagccaggcggaga

SEQ ID NO: 237180 - RNA, 71 nt, Homo sapiens
aacaagacacgaaacagggacagcgacagaagaagaccaaaccaggcccagaagcaccgcaacaaacgggg

SEQ ID NO: 237181 - RNA, 81 nt, Homo sapiens
aaaaacaacaccaggacacagaaggcgaaacagaaggcggaggcagaacgaaagaggagaaaaggggaggagagcacagaa

SEQ ID NO: 237182 - RNA, 39 nt, Homo sapiens
gcagccaggcgggaaaagccaggcggccgcgcgccgggc

SEQ ID NO: 237183 - RNA, 80 nt, Homo sapiens
aacagaagaacggacaccgcccaccaaccagagagccaagggcccgacccaggcaagcgagcaggcgagcaggagcccac

SEQ ID NO: 237184 - RNA, 79 nt, Homo sapiens
gacgaagaccagagaaggggagccccgggccggccacccccagccggaagcagccccgaaacggaccacaggaagccgg

SEQ ID NO: 237185 - RNA, 71 nt, Homo sapiens
caggaggaacagaccggcggccgacgggacacaccgggcaggaaaagagaaagcaacagaaccgaaaagag

SEQ ID NO: 237186 - RNA, 82 nt, Homo sapiens
gaaaacacagccgcagaagaacgggcaggacccggagcccgagaccgagccacccagaagccgccagggccaccggagaccg

SEQ ID NO: 237187 - RNA, 73 nt, Homo sapiens
caggaacagggcagacgagcggaggacacccaacccggcgggcaacaggggcacacacacgagaaagagccac

SEQ ID NO: 237188 - RNA, 77 nt, Homo sapiens
ggacgggagacacaggaagagcgggccaaccggggacgagccagacggggcaaagaggaagagaaacaccaaggaac

SEQ ID NO: 237189 - RNA, 73 nt, Homo sapiens
acagaacaagaaccaaagaaaacaaaaggggacaggacaagcagggaccaggcggggacagaggccaggccaa

SEQ ID NO: 237190 - RNA, 53 nt, Homo sapiens
cggccaagcgaggggaaaccgcgccagagacacagaggagaacaagcggagaa

SEQ ID NO: 237191 - RNA, 81 nt, Homo sapiens
cacgggcgaaggcagcacagccagaggagcagaagcagccggcgggaaagaaccccgggagcgaagaagcggaacgacaag

SEQ ID NO: 237192 - RNA, 75 nt, Homo sapiens
agacggccgcgcggcccgcaggggggggccgaagaagccagggggaggaaagcagacagacccaccaagagggcg

SEQ ID NO: 237193 - RNA, 76 nt, Homo sapiens
agacgacagcaacccgaagacagggaaaaggacaacagaaagccgggaaggaccagaagagcgagaaaaagaaaag

SEQ ID NO: 237194 - RNA, 78 nt, Homo sapiens
gaggagggggaagcccacggcggacgcaaggaaagaaaccgacggccccaggagagagccagcaggcagcaggacgaa

SEQ ID NO: 237195 - RNA, 82 nt, Homo sapiens
cgagggcagagcagaagagacgacaaaggaaaaaacaggagaagcagaacccagcgaaggacgaccccagaaagagcaacag

SEQ ID NO: 237196 - RNA, 83 nt, Homo sapiens
aagaggcggccggcgaaaggagcgggccggcaagggaggcaccccagccgcggccaggcaggggcaggagccacgacgcccca

SEQ ID NO: 237197 - RNA, 74 nt, Homo sapiens
aaccaagaagcaccggcaccagcagaccgaagcaaaaaagcgaagggacgaaagaaagaaaggcgagcaagaaa

SEQ ID NO: 237198 - RNA, 55 nt, Homo sapiens
ggccagggaacccggcaccgccccagcgcccgaagacaacaaacacagcacaccg

SEQ ID NO: 237199 - RNA, 72 nt, Homo sapiens
cgggcaccacagggcagaaaagggagcaaagagaggagagaggaccggaaaacccccaaggccaggagagcc

SEQ ID NO: 237200 - RNA, 92 nt, Homo sapiens
cggagccagccagccgcccgagcaccagcagcccgccaggagcccggaaggggccgcacgagacagaaagacacaccaaacccaggggaacc

SEQ ID NO: 237201 - RNA, 80 nt, Homo sapiens
aaggcccaaagcccacagcgcaaacgggcgagcaccaaagccaaggaagcccagaagaaagagcaccccccggaagcagc

SEQ ID NO: 237202 - RNA, 61 nt, Homo sapiens
ggggaaccgccaaagcccgggcgcggaagaagccaagccgcagaaggacgccccgaagcgc

SEQ ID NO: 237203 - RNA, 75 nt, Homo sapiens
acaagaagaagagccgcccccaccagacgaggccaccagccagggaacgaagcggaggaggaagaagcaaagggg

SEQ ID NO: 237204 - RNA, 79 nt, Homo sapiens
cacccgccccccagccaggaccaaaccggggcgaaccccagaagaagagaaggcacaagagaggacccacacagcgacc

SEQ ID NO: 237205 - RNA, 68 nt, Homo sapiens
ggaaacaagacgaagccaaacgcacaaaacagcgagcacgggccccaggaccaggggcggaacaacgc

SEQ ID NO: 237206 - RNA, 73 nt, Homo sapiens
acgaggcaacgaagagaaccgaagcgaaccacccagagagcaagagggccggaagaagggccaaaggcaaagc

SEQ ID NO: 237207 - RNA, 93 nt, Homo sapiens
gagagcacaggaaaagaaaaccggagaccagggcaacccagacgaaagcccaggaaagagacacgcaaagaagaaaaaaaacgaggagagcga

SEQ ID NO: 237208 - RNA, 78 nt, Homo sapiens
gcagacgaagaagaagcaagcgaggcccacaagaagggagacggcacagagaaaaaacagagggaaaaagggaccacc

SEQ ID NO: 237209 - RNA, 84 nt, Homo sapiens
aagaggggggagacggggaggacaggccagcgcggccaagacccgccgcaagggggcagagagcgaaggagagccagccccaaa

SEQ ID NO: 237210 - RNA, 84 nt, Homo sapiens
gggagcgcgcccgccgagcgcaacagcggcgggcggggcaccccagcgcccgggggcggagaaggccaggcagcagcgcaggag

SEQ ID NO: 237211 - RNA, 70 nt, Homo sapiens
gaccccccgaaccagaggcgaagagcagaggacaaaccggcgaccacacacggggacgacggggaagccg

SEQ ID NO: 237212 - RNA, 78 nt, Homo sapiens
cagagacccacccccagaggcgcggccgcacaaccaaggggaggacgcaaccggcgcaaagaggcaacgaacaaggaa

SEQ ID NO: 237213 - RNA, 84 nt, Homo sapiens
cggacagcaaaaacacagaaggaaaacccagacgacacaacccgggcgcgagcccgcggccccaaaaagcggcgcaagacggag

SEQ ID NO: 237214 - RNA, 87 nt, Homo sapiens
acaccacaggggagggcaccagcagacacgccgccgcccaggcccgggaccgggagcccgggaccgggagccggggggccaccccga

SEQ ID NO: 237215 - RNA, 72 nt, Homo sapiens
gaaccagcaaccagcaggcagggagagaggggcggaaaggacagaacgaccgcccggccagcccaccccccg

SEQ ID NO: 237216 - RNA, 55 nt, Homo sapiens
ggaggaaaggaggacgagaagaaaggcacagaggaagcccaacgcagcccccgga

SEQ ID NO: 237217 - RNA, 72 nt, Homo sapiens
gcccggaaagacgccaaaaacagggaaagggccagcacaggagagaccacccggggaaacaaaaaggcggaa

SEQ ID NO: 237218 - RNA, 55 nt, Homo sapiens
ggcggaaagaggaagaccaaagggcacacaagcgagaaccagccaaaacacacga

SEQ ID NO: 237219 - RNA, 72 nt, Homo sapiens
ggccaccacagaaacaaaagcaacaaagagggcacgcagaaaagaagagcgaaacgggaccacacggcgcac

SEQ ID NO: 237220 - RNA, 65 nt, Homo sapiens
ggagggaacaccagacaagcagagaaacagcccagcacgaaagcccacgagagaagcgagaaagg

SEQ ID NO: 237221 - RNA, 79 nt, Homo sapiens
cagaccgcgacacgagcagcgcagggaagcaagagcaagagcggcgggaggggaaggagcagccacccgggcagaaagg

SEQ ID NO: 237222 - RNA, 62 nt, Homo sapiens
cccgcaagcgcgccgacaggcaaacgaagcacggcaggccaccagccggcaggacgcgcccg

SEQ ID NO: 237223 - RNA, 50 nt, Homo sapiens
cagagagaaccgacaggaaccagacacgcaaacagcgaccccaaacccaa

SEQ ID NO: 237224 - RNA, 63 nt, Homo sapiens
ggaggacaaaacggggacaggcccagcaacggcccccgaacccagcccgagggagcgcccaaa

SEQ ID NO: 237225 - RNA, 79 nt, Homo sapiens
caggcaagccccgccccggagagaccgggcgcacaccccccgacgccaaagaggggaggccgggggaaaaaagcagcgg

SEQ ID NO: 237226 - RNA, 84 nt, Homo sapiens
gaaggacgaggcgaggcgagaaacgagcacccgaggaggccgcgaggcacagaagaccgggagacgcaggaaagaaaacagaag

SEQ ID NO: 237227 - RNA, 73 nt, Homo sapiens
ccagggcccacacaacgcaaggaaagaggagcaggccgggcccgccagggcacgcgcccgccacgggaagccc

SEQ ID NO: 237228 - RNA, 72 nt, Homo sapiens
gggggcgccggaacaacgggcgaggccccggcgaaggagcgcaacccaggaagagggcagcgagaagaaaaa

SEQ ID NO: 237229 - RNA, 56 nt, Homo sapiens
ccgcaacaaagaaaagccccagacaaacccagacccagaagggaacgggaaaccca

SEQ ID NO: 237230 - RNA, 76 nt, Homo sapiens
ccgagcaaaggaagaaccaaagaaaacaagagggccagaggaggacagcacgcaggcaagaaaagcagccccaaag

SEQ ID NO: 237231 - RNA, 89 nt, Homo sapiens
ccaggcccgcgaccgccgccagcgcccgagacgagccaaaccaggcgaccgagcagccaagcaacgggccccgggccccgacagcaccc

SEQ ID NO: 237232 - RNA, 71 nt, Homo sapiens
cgacaacccccagaaagccaagccggggggggaaaaggcgccgagcacccaacgagaggacagaaaaccca

SEQ ID NO: 237233 - RNA, 74 nt, Homo sapiens
cagggcaagaccagacggaggagagacacacaccggcccccggccacgcagggcggcacaaacaaggaaacagc

SEQ ID NO: 237234 - RNA, 69 nt, Homo sapiens
acaacaccggggagcgcgggacaaaccggcgaccacacacggggacgacggggaagccggacagcaagc

SEQ ID NO: 237235 - RNA, 82 nt, Homo sapiens
aggaccagaaggacacgagagagcagcaccagcagaagagggcccgaccacggcaacccagaggcgaagcaggacacccgca

SEQ ID NO: 237236 - RNA, 74 nt, Homo sapiens
agcaccggagggagaagacagccacaagcgagcagaaaggaacaggaaaaggaccaaaagcaacacacgaaaac

SEQ ID NO: 237237 - RNA, 74 nt, Homo sapiens
gcgaagaacgcaagacacccgggcccacagcaagaagggggaggagggcccacacaaacaggaggcaggaagag

SEQ ID NO: 237238 - RNA, 80 nt, Homo sapiens
ccgcggacccgaccgcccacccgcccgcccagcccaggacccaaagacaggaccacgcaccagcagagaaggaaagcaaa

SEQ ID NO: 237239 - RNA, 71 nt, Homo sapiens
gaggagggaggaaaacaaccgagggcagaccgaaacagaggcaccagagaaagcagcccgaggcagcgcag

SEQ ID NO: 237240 - RNA, 71 nt, Homo sapiens
aacacccgccaaagcagagaaaacacaggccccagacacgaggccagcgcagcgacggagaaaccaagcag

SEQ ID NO: 237241 - RNA, 82 nt, Homo sapiens
acgcacaggcgcaagacacaccggaggcgacggccaggccacaggccggcaagaagccaacggagaaccaaggccaagacca

SEQ ID NO: 237242 - RNA, 71 nt, Homo sapiens
aacaaaagaggagaaagggcagaacaagaaagcaacaaccacagagaacaagacaagcgaaacgaagacca

SEQ ID NO: 237243 - RNA, 62 nt, Homo sapiens
agaggacaagggacccggagagccccaagagcccaagaacccaacaagggccccagaagaca

SEQ ID NO: 237244 - RNA, 82 nt, Homo sapiens
cgcagggcgcaggacccgcagagaagaaacaccacgcaggaggagaaagagaaggaaacccacagacccagcaaagaggaga

SEQ ID NO: 237245 - RNA, 69 nt, Homo sapiens
ggcacaacaggcccaacacgcagacggcagacgagaacacacaagaaaaacccggggaaggcaagacgg

SEQ ID NO: 237246 - RNA, 79 nt, Homo sapiens
gggagaagcgagagacacaaggccaggacacaggaacgccacaagaaacaacagcaaggcgagggccacgaaacagagg

SEQ ID NO: 237247 - RNA, 66 nt, Homo sapiens
gaacagaaccaaccaggcacagggaccaagaaaggcccagggaccaaagcccggacaaggcccgag

SEQ ID NO: 237248 - RNA, 66 nt, Homo sapiens
ggaaacccgaccaggcccgcccaggaggcacgggaggagcagccccagagcgcacaccagggaaag

SEQ ID NO: 237249 - RNA, 76 nt, Homo sapiens
gcgaggacggacagggggccacaagcaggagaaagaccgagcgagacagagggaaagaaccaccaccaacgagaca

SEQ ID NO: 237250 - RNA, 110 nt, Homo sapiens
gcagaacaaagagcgcgaacagcagaccgaaagccggcggagaggaccggagcggaaaacccgaaagcccgggggagggagccacccccgaagccaagggaaacagcaag

SEQ ID NO: 237251 - RNA, 57 nt, Homo sapiens
ggaccacccgggcacagcaggcacggagggggaaaggaagaaaaggccacaagagaa

SEQ ID NO: 237252 - RNA, 53 nt, Homo sapiens
gcgaaggagggccgcaagacaacgaagagaggaaagaagcggaaaggagggag

SEQ ID NO: 237253 - RNA, 80 nt, Homo sapiens
cggccgaaaaggcgaccgccccaaggaaccacgcagccccgcaaagggaacaggaagcagccacggaggggacgcccaga

SEQ ID NO: 237254 - RNA, 72 nt, Homo sapiens
gagggaggaaaaaccgcagagaaacagaacccaagccaggcacccaaaaaaacaaggcccgggggaagagga

SEQ ID NO: 237255 - RNA, 85 nt, Homo sapiens
ggaaaaggcaaaaacccacaccgcaacccagcgagagaaagggaggcacccgagcagagcacagaagaagcggcgggagaccagg

SEQ ID NO: 237256 - RNA, 75 nt, Homo sapiens
cacccggacaccacggaccaaaaagacccgaccaggaagaagagaagaccggacgagagaccgaaccaaagagcc

SEQ ID NO: 237257 - RNA, 63 nt, Homo sapiens
acagcggccggacgcaggggacaccaccaagacgacacgagacgagaaaccagaaaagcggaa

SEQ ID NO: 237258 - RNA, 79 nt, Homo sapiens
cccccagcccaaacccggaaacccagcggcccagccggacgggcggaccccggcaaaacgcccgagggagcgcgcccag

SEQ ID NO: 237259 - RNA, 74 nt, Homo sapiens
ggccgggccccgccccacgcgccccacaggaagcccgcagaaggcaagccgaaagaaggacgaagcccaagcac

SEQ ID NO: 237260 - RNA, 79 nt, Homo sapiens
cagaggcgggaggggccgggaggcagaggggcagggcggagcggcggacaccagaagagaaaagggcaagccagacgca

SEQ ID NO: 237261 - RNA, 73 nt, Homo sapiens
aacacccaaacggaaggacacagagccaacccagaagagccaagggaagaaaagaacagggcaaaccaagagc

SEQ ID NO: 237262 - RNA, 64 nt, Homo sapiens
ggagcccgagagagaaggacgccgacaagcaggagccgacccaccagcaaaccacagagagagg

SEQ ID NO: 237263 - RNA, 66 nt, Homo sapiens
ggacaaagcggccagggagcacagaaggacagaggcagaccgagaagacccgggaagcccgggaca

SEQ ID NO: 237264 - RNA, 84 nt, Homo sapiens
cacccagacagcaccacgcccggggggacgcccccaccacaccgggagccagccggcccggccggacgaaagaagcaccagggg

SEQ ID NO: 237265 - RNA, 42 nt, Homo sapiens
ggccagagggcgaacgagcgaagaccgaggccaaaagaaagg

SEQ ID NO: 237266 - RNA, 79 nt, Homo sapiens
agggcacaccaaggaggccacgccaccgccggccacgccgcagccccagggacaggaaagcaaggcccagcgagccgga

SEQ ID NO: 237267 - RNA, 71 nt, Homo sapiens
gagcgccgggaacaaaaccagcacccaaggcagccggaaacgagcgacccgagccacaacgcgaccaaaag

SEQ ID NO: 237268 - RNA, 80 nt, Homo sapiens
cgacacagagaggaagacagagcgaaggacaacacagaggacccagccacaccacaaggccagagacgacggaacacagc

SEQ ID NO: 237269 - RNA, 73 nt, Homo sapiens
caaccggacgcgagcgaggccggacgccggaccgccacgccaccgagccaggacaaaaccaggcagaaccaac

SEQ ID NO: 237270 - RNA, 75 nt, Homo sapiens
cccaggggcggcggcaggaccacaggggaggaaggccccagcccgaggaggaccaaggccgccagcaagggggcg

SEQ ID NO: 237271 - RNA, 68 nt, Homo sapiens
cagcggcagacggaaacgacagaagcagagaaggacagggcgaaccccgcgccccgcagcggagagcg

SEQ ID NO: 237272 - RNA, 66 nt, Homo sapiens
ggcggacgcaagcagcgcaagaccggccggcacggggggagggccgcaggacccaacaaccaagag

SEQ ID NO: 237273 - RNA, 75 nt, Homo sapiens
ggccgagacacgcagcggcggccagggaccaggaaaacgagagaagaagaccagaagaagcagaacgccaaagaa

SEQ ID NO: 237274 - RNA, 89 nt, Homo sapiens
agccagggcgccagaagaaaacggcgagaggggcgagaacgccacgcgggccggcgaaagcgcaggaggcaaagggaccccaagaaacc

SEQ ID NO: 237275 - RNA, 76 nt, Homo sapiens
acaaagggcaggacccgagcaaggagcagggagaaacaccaacaagccagagcagagcccagaccccacagccagc

SEQ ID NO: 237276 - RNA, 71 nt, Homo sapiens
acaagaaaagccaacgccggggagacaaagaaaacgaaggaaggaggacccgaggagagagaagacggaaa

SEQ ID NO: 237277 - RNA, 73 nt, Homo sapiens
aaggaccagcgcaacggcaaggacccgcccccaagacgggagggccgggcacgcccccgagggaaacaagcgc

SEQ ID NO: 237278 - RNA, 74 nt, Homo sapiens
ccccaagagcgggagcagccaaaacaagcagaagcaagaagagaaaaaccgaacgaaagagccggcgcaccgcc

SEQ ID NO: 237279 - RNA, 70 nt, Homo sapiens
gagagagagcaagagaggaagaagaacgacccgcccggggcagcagccaccgcaccagccaagacagacg

SEQ ID NO: 237280 - RNA, 77 nt, Homo sapiens
ggggcccaaaacggggagccaagcgggacccccaaaagacaagggcaaaacggaccagacacaaagaggagggcggg

SEQ ID NO: 237281 - RNA, 41 nt, Homo sapiens
acaaggaaaacaccacaagaccagccgacagcgaccaaggc

SEQ ID NO: 237282 - RNA, 81 nt, Homo sapiens
aagacacggagcaaggaggaaaacacacgcaggcggacaccgaccgcaggaaggaggaggaggagggagccaggcagaaaa

SEQ ID NO: 237283 - RNA, 74 nt, Homo sapiens
ccaaacaaaagacacgagggggggacaagggaggcgggcacagcacgggaaagaacagcaacccgccaggacca

SEQ ID NO: 237284 - RNA, 118 nt, Homo sapiens
gagagaggcaccgggacggaccgagaccggaccgagagcggaccgagagcgcgaaacgcacgagaagcgcgcaagaaacacgcgagcgagcggcaaagaggggccggaccacaaggca

SEQ ID NO: 237285 - RNA, 71 nt, Homo sapiens
ggaagcaaacgggccaaaggacagagaagacagagacaggaaaagcgaaaaaaaaaaaaaaagggcacaaa

SEQ ID NO: 237286 - RNA, 85 nt, Homo sapiens
cgaacgcaccgaggagaagaccaggaggcgggccaaggaaacgaaggaggcccaaccacaaaaggagccgacggaacccagacgg

SEQ ID NO: 237287 - RNA, 35 nt, Homo sapiens
cgccccagcccaaagggaagcaaaccgacaccagc

SEQ ID NO: 237288 - RNA, 75 nt, Homo sapiens
cagcgcccagcagcgcaggagggacagagaacggccgagaggccgccaccacggacacaggacgaagcacagggg

SEQ ID NO: 237289 - RNA, 73 nt, Homo sapiens
aacccacccagcacaccccgcgaaaggaggaggcacagagcccgcccccgaggcgcaggcccccggcgccgga

SEQ ID NO: 237290 - RNA, 80 nt, Homo sapiens
agggaaaggagcggggagccccgcgccacaggcggcccaaaggcgaaacacagaaggagacaaccacagggccccaggac

SEQ ID NO: 237291 - RNA, 78 nt, Homo sapiens
accaggagacccaggagaggcggaaagagcgcaaacggcagggcagccagcccgcaccgcagaagcacccgccagaga

SEQ ID NO: 237292 - RNA, 79 nt, Homo sapiens
cggaccgcaggacgacagaccgagggaggacaccggaccccggacgcgggaaagccggagcgggcagggcacacaaccg

SEQ ID NO: 237293 - RNA, 54 nt, Homo sapiens
ggagcagagccagacagccaccacccgacaacaggcacaaagagagaaggaaca

SEQ ID NO: 237294 - RNA, 83 nt, Homo sapiens
cgaaacagaaacggaacaccaagcccaccgggacaccgacccaagcccagcagaagccaacagacggggccgcaaccagccac

SEQ ID NO: 237295 - RNA, 78 nt, Homo sapiens
ggaggagcccgaagacagccccgacggagacgcgcagaagaaagggacaaacacgaacgcccgaacaccacaaacacg

SEQ ID NO: 237296 - RNA, 62 nt, Homo sapiens
gggaagcagccgaccagccgcggagccgggggcagggggcgacagacagcggaaagccccag

SEQ ID NO: 237297 - RNA, 75 nt, Homo sapiens
cgaggccggacgcacccggggggcccaggaagcagcgacagcagaaaccacagaggaccaaaaccccaaaagggc

SEQ ID NO: 237298 - RNA, 61 nt, Homo sapiens
cagacggcgagaccccgcacagagggcgaggaccaacaagacacacagaaaagcgaaaccc

SEQ ID NO: 237299 - RNA, 54 nt, Homo sapiens
gcccacagaggcaccaaaccagaacccacaggagggccagaggacaaagcacgg

SEQ ID NO: 237300 - RNA, 71 nt, Homo sapiens
agcgggcggagcagagggccgcaaggggagcagccagagccaagccggagaccgagagacgccccacagac

SEQ ID NO: 237301 - RNA, 79 nt, Homo sapiens
gccgcgccgcgccgcaccccgagcgaccggccagcacccgcccgaggacagagaggcgagcgcccggaggggagagagc

SEQ ID NO: 237302 - RNA, 64 nt, Homo sapiens
accacccacgggggccaaggaggaagggcccagacagaagacagcccaacaaggcgggacgaca

SEQ ID NO: 237303 - RNA, 42 nt, Homo sapiens
cgccagcagcacgggaggccgcccgaaaacccccaccagcgc

SEQ ID NO: 237304 - RNA, 71 nt, Homo sapiens
ggcaggacgaggacgaaggccgagggcaagaagaccggaaggagagaaagccagaccggaaaagaagaacg

SEQ ID NO: 237305 - RNA, 64 nt, Homo sapiens
aggagcgagaccaacgggagccccaagacacaccagcaagcaacacaccgggccagagagcacg

SEQ ID NO: 237306 - RNA, 64 nt, Homo sapiens
gcgaggaaaaggcggcgggagggacaagagaaaaaaagggcgggcgaacaaaaagagcagagga

SEQ ID NO: 237307 - RNA, 79 nt, Homo sapiens
aacccggcaccccacagcccagggaaggcaccaaaagggggggcaggaaagaccagaaagacccgcagaggaaacggca

SEQ ID NO: 237308 - RNA, 81 nt, Homo sapiens
gcggacccgccaccacacggcaccggagaacacaaggaacgaaaggaagggaagaagcagaaccaagacaaaagaagaccc

SEQ ID NO: 237309 - RNA, 71 nt, Homo sapiens
ccacacagcgcccaggccagagaaggggaaggaggggcagcgggccaggcaggccagcagacaaggaagac

SEQ ID NO: 237310 - RNA, 74 nt, Homo sapiens
aacgccaagacacaaagcgccgggccgcccgcggcagagcagcagagcgccgcccacaagagacaaagaaaagg

SEQ ID NO: 237311 - RNA, 82 nt, Homo sapiens
gccggaaaccggagcgcgcagcagaacccagaggacagagccaaaagaccaggcccagcgacaggaaaaggaaaccgggggg

SEQ ID NO: 237312 - RNA, 71 nt, Homo sapiens
agcaacagagaacaagaggagaggaagagagcaaggacaccagcagcaaaggcacgcggccgccgaacgcg

SEQ ID NO: 237313 - RNA, 74 nt, Homo sapiens
ggcaaccaagaagaagaaaggcaaaccagacggggaccccgcgaacaacaaccacacagaaagaccagaaagcg

SEQ ID NO: 237314 - RNA, 74 nt, Homo sapiens
aagcaaagaagaaagccaaggggaagggaaacgagacagccacaccgcaaccacaccgagagcacaacacaaag

SEQ ID NO: 237315 - RNA, 40 nt, Homo sapiens
gccacaagcaacgaagggcaagcagaaaaggcggcaggca

SEQ ID NO: 237316 - RNA, 62 nt, Homo sapiens
cggcgaccaccccggcgcccccggaggcagcccaaggccaaccccacgcaccgcccgccccc

SEQ ID NO: 237317 - RNA, 77 nt, Homo sapiens
gaagaaaggagaagaggacggaagagaaagggcaaagcgaccagagcgaaaaggaaaacagaacaggaggaaaaaaa

SEQ ID NO: 237318 - RNA, 78 nt, Homo sapiens
cagaggcagccagcagggggagggcaccggagcagagcgccaccagacagaggagcccggaggaggcaggagcccgag

SEQ ID NO: 237319 - RNA, 72 nt, Homo sapiens
ggaagaagagaaggcaggggcacacaggaagaaccagggacgaaagaggagagaacgaccccagggcaggaa

SEQ ID NO: 237320 - RNA, 70 nt, Homo sapiens
gaccacagccccgaccgagagaaccagcgccaggacagcagaccacagcccggcaggcccaaaaacccaa

SEQ ID NO: 237321 - RNA, 70 nt, Homo sapiens
agacaggaccacgaaggaaagaggagggagggagggcaggccgcagcccgagcccgccgcaggcggaaga

SEQ ID NO: 237322 - RNA, 70 nt, Homo sapiens
cggggaagggaccagggcgccgggccggcccgggcccagaccaagaaagggggagaccagccaacagacc

SEQ ID NO: 237323 - RNA, 38 nt, Homo sapiens
caggagaaggcagagaaaacagagggaggaccaagcca

SEQ ID NO: 237324 - RNA, 74 nt, Homo sapiens
ccccggcagaagcggcagcaaaggaaacagggcaagacagaggaagaaaaggaagagcaaggaagccaacagga

SEQ ID NO: 237325 - RNA, 91 nt, Homo sapiens
ccggcgcgaccgcccggcaccgggagaaccaccgccaccgccaccaggagccaaaacacaccggaagaccccaccacccccgagagaaggc

SEQ ID NO: 237326 - RNA, 60 nt, Homo sapiens
gggcacccacgcaaaccagggcgacgggacaaacacaggaaggaacacccggaccaaaca

SEQ ID NO: 237327 - RNA, 79 nt, Homo sapiens
caagaggaagcacacggaagagcgaaaaagagaaagccccagaaccgggacaacccagcaaacaggccagacccgacag

SEQ ID NO: 237328 - RNA, 77 nt, Homo sapiens
ccccagccacccacaaacagagagaaggaaccacccacgcaggcagggcggagaacggaaaagcaccaggaagcaga

SEQ ID NO: 237329 - RNA, 114 nt, Homo sapiens
gcgggcgcacggccaccagcaacggcgagggaccacagcgagaccgcgccggcgaccaggggggaggcagcacccggcggcacgcgccccgcaaagacgggagggaacgccgag

SEQ ID NO: 237330 - RNA, 79 nt, Homo sapiens
gggagaagcagcagaaccagaccagcaggagaaacaaaacccgcagagaaggagcgacaaggcggaacagaaaccagag

SEQ ID NO: 237331 - RNA, 74 nt, Homo sapiens
agaccacacccacagaaggagagcaaaggagacagaagagagcccagagaaacaagaggaaggcaagaagcgga

SEQ ID NO: 237332 - RNA, 84 nt, Homo sapiens
cgagagcgagaaacaaagccacccagccaagaagacgaaagcccagaagcaccgaacagcagccaacaaaacgcacaagccaga

SEQ ID NO: 237333 - RNA, 68 nt, Homo sapiens
cgaacaaaaggccggagcgacaggaacggaaaacagccccaaagcagcagaccgaagaaagaagaccc

SEQ ID NO: 237334 - RNA, 86 nt, Homo sapiens
ccgcgagccgcgcggcgcggggccccgcggcggaggaagcgcaacaggaaaggagagaagaaggcaagggccacggcacccagaag

SEQ ID NO: 237335 - RNA, 73 nt, Homo sapiens
gggaggaggacccagccaaagagagaacgaaaggaaaccggaaacacagagcgaaagacaccagcacccgagg

SEQ ID NO: 237336 - RNA, 87 nt, Homo sapiens
acaaaacaggaagccaaaacggaccagccccaggaggagcaaggcaaacagaaagacagcaagacacaagggcgacaccagaaagcg

SEQ ID NO: 237337 - RNA, 56 nt, Homo sapiens
aggggagcgcaggccgagaaaggagcgagagccaccaggcaacgcaccaacaacac

SEQ ID NO: 237338 - RNA, 68 nt, Homo sapiens
aggaaggaaaccaagcacaccgccccagccagcagggcccaagcaggacgaagcagggaaacaaaggg

SEQ ID NO: 237339 - RNA, 59 nt, Homo sapiens
gaaccagaagcacgaggaaaggaacagacaagggcaaaaaaagacccagaagcccaacc

SEQ ID NO: 237340 - RNA, 70 nt, Homo sapiens
accgaggagaaggacaccggaagggggcaggcacaaagagcgagagaccccaacggcggaaggggaagag

SEQ ID NO: 237341 - RNA, 75 nt, Homo sapiens
gagaggcacggagaagccccccaccgcagaaaaggacgggacacggagaggcgcgggaggaaacggaggcgcggg

SEQ ID NO: 237342 - RNA, 81 nt, Homo sapiens
acaggaagaccagaaaagcgcggagacaccaccccccccacgccccagaccagcggaaaaccagaacaggacgacacggcc

SEQ ID NO: 237343 - RNA, 74 nt, Homo sapiens
ggccaaaaggcaacccgggagaaaacagaaaggacaagaacccaaccagcagcaaaacaccaaggaaagggagc

SEQ ID NO: 237344 - RNA, 72 nt, Homo sapiens
gcacagccgcggcggcagcagcaggagagaccggagagaacagaaaaaaagcggcccgggaccaggaaagac

SEQ ID NO: 237345 - RNA, 52 nt, Homo sapiens
aaaggagaagaaacggacagagaacgcaggccaaaacagaagaggcaaagcc

SEQ ID NO: 237346 - RNA, 58 nt, Homo sapiens
aacggaggaacaggagcaccacgagagcacccagagcaaggacggggaaccaccaacc

SEQ ID NO: 237347 - RNA, 84 nt, Homo sapiens
cggggcagcgggccggcgccggcgcgggagggaagccgggcgccaagagccagcccagccagggggggggggggaggcagcccc

SEQ ID NO: 237348 - RNA, 59 nt, Homo sapiens
aaaccaaggagcggaaagacagagccgaccaaaaggaaagcgcaggcaggagaaggaca

SEQ ID NO: 237349 - RNA, 85 nt, Homo sapiens
acaccacagaaagaccgaagacaaaaaccagaagacaagcagcggcccaggaaggggcgcagcacgcagccgcgcgacggcggag

SEQ ID NO: 237350 - RNA, 77 nt, Homo sapiens
agaggaggccccccagccagggaacccggccccgggcgaagagccggccgccgcgcgcccgacacagaagagccgcc

SEQ ID NO: 237351 - RNA, 72 nt, Homo sapiens
aaggcaacaagagagagggcgcggcagaccggggcacggcaggggagacgggcgaacacagggaagaaggac

SEQ ID NO: 237352 - RNA, 53 nt, Homo sapiens
gagaaggaccaagaaccagggcaaccaagcggcgagacaaagcagagacccag

SEQ ID NO: 237353 - RNA, 76 nt, Homo sapiens
gcagccgggccagggccagagcaaagggccaagcggagaacaaccccaccagacagccggcccaaacggcaacagg

SEQ ID NO: 237354 - RNA, 59 nt, Homo sapiens
ggcccgcagcccccgccggccgcccaacaccgaacaccacagaagcgaaggggacaggg

SEQ ID NO: 237355 - RNA, 50 nt, Homo sapiens
aagaaccacgcccgcaccagccacgcaccacaaaaacacacagagcgaaa

SEQ ID NO: 237356 - RNA, 72 nt, Homo sapiens
ggaagagcggagacggaggaggggccggcgggggacgagcaggccaaagagaaagagaaaggagagcaagag

SEQ ID NO: 237357 - RNA, 64 nt, Homo sapiens
cgagacggcggcagcagcggcacaggagggagccaggagcgcgggagcgaaggccagccacacg

SEQ ID NO: 237358 - RNA, 74 nt, Homo sapiens
gccaccacacccagcggaggagcaagaggggggggcccccccgaagaaaggaaccggggagcggcgaaaaaaaa

SEQ ID NO: 237359 - RNA, 62 nt, Homo sapiens
cgggcgcgggcgaggccgggcggcgccgccccaccggacccgcaggccagcgcgcgggagga

SEQ ID NO: 237360 - RNA, 67 nt, Homo sapiens
gcccggagagagcacgcccaccgcgccggagccaaagagagccgggccagcgaaccaccggccagca

SEQ ID NO: 237361 - RNA, 35 nt, Homo sapiens
ggaagaaacgcacgagccgccgggcccaggcggag

SEQ ID NO: 237362 - RNA, 81 nt, Homo sapiens
accgccggcgcgggaaacgggcgaagcgacgagccgcgaggaggcaaagaccagcaaggcaccaacagaaaaacaacgccg

SEQ ID NO: 237363 - RNA, 105 nt, Homo sapiens
agcagcccgagcgagcgagcggcgcccagcccagcgcccggccgaaccccccgcagcaggaggagcgagcgacagaaaccaacccaagagcgcccagcggaaagg

SEQ ID NO: 237364 - RNA, 122 nt, Homo sapiens
gaggaagcgcggcgcgcgcccagcgccgccccgcgcgcgcccgccacggcgccgagccgcggccgacagggcagaaaagaacagacccagaagaagcgaaaggggagaaagaagaaagcaag

SEQ ID NO: 237365 - RNA, 82 nt, Homo sapiens
gaaaagccacccccacgaaggggaaaggcacccacgggcccgggacacccagacagagagagcgcacgaagaagggcggagg

SEQ ID NO: 237366 - RNA, 79 nt, Homo sapiens
gggagcgcggaaacggaaccgggaggcgacgcacacgagcggaggcgaaggacagaaagcgggacacaagcaggagcac

SEQ ID NO: 237367 - RNA, 76 nt, Homo sapiens
agcacaagagcagacaagcgggggaggcaggccgccccccagcgggcgcggacgcaaagccgaccacagaaagacc

SEQ ID NO: 237368 - RNA, 66 nt, Homo sapiens
cgaaacccaaaaagcaaaaaacgcccacaccagagacagcgcacgaaacacacaaagaaccaccac

SEQ ID NO: 237369 - RNA, 69 nt, Homo sapiens
gagcccacgacagaacgaaaagaaaggaccccagcggaagcgaggcggccggccacaccagccagccaa

SEQ ID NO: 237370 - RNA, 70 nt, Homo sapiens
cggagcagccggggcggagcggggagaacacccagcagaggcgcaggaaaagcaccgaaagaacacggaa

SEQ ID NO: 237371 - RNA, 75 nt, Homo sapiens
cccaccgaagaagagacacagcacagaccgcccaagccgaggaccaaaccaaagggagggaccggggcggaagag

SEQ ID NO: 237372 - RNA, 73 nt, Homo sapiens
cagcccaccgcagcgggacaccagcacaaggcacagacaggcgagcggggacggcagagcgggccgaacccag

SEQ ID NO: 237373 - RNA, 77 nt, Homo sapiens
gccgcgggaccccggcacgcccaggccgagcacgacagggaggccgcacagaggaggagcaccaaaccgagggaggg

SEQ ID NO: 237374 - RNA, 67 nt, Homo sapiens
accaggccaacgcacggcccaaggccggggagaaaaggaggaggaaagggccgagaaagaagagagg

SEQ ID NO: 237375 - RNA, 44 nt, Homo sapiens
ggccgaggcgggggacacaagcacaaaccacgagaagcaaaaac

SEQ ID NO: 237376 - RNA, 72 nt, Homo sapiens
agcggcgggcggggcaccccagccagagccaagccggagaccgagagacgccccacagacacgggccacagg

SEQ ID NO: 237377 - RNA, 87 nt, Homo sapiens
ggcaccaggccaccacagaaacaaaagcaacaaagagggaagcaaaccaggagccacagcggcagggaaaaaaccagcaaccgcggg

SEQ ID NO: 237378 - RNA, 74 nt, Homo sapiens
agcaaaccaccccgccccgcgcagagcagacagaacagccgcgcggcccggaaggccaaagacagacgggccca

SEQ ID NO: 237379 - RNA, 76 nt, Homo sapiens
acccacaaacccagagacagcggaggaaaaaccccaaaaggcggaaggaccaccagagcaagaagcccgaacgcca

SEQ ID NO: 237380 - RNA, 81 nt, Homo sapiens
gagcaaggggcacgcagaaggaccggccacgagaaggaagaggaaaaagagccgaccgagggcgcacaaagaagcagaaaa

SEQ ID NO: 237381 - RNA, 79 nt, Homo sapiens
acacaggaaccaggaaagcaaacgccaaaaaaaaagagcagcccaggcggccgaagggcaagagggcacagaagacggc

SEQ ID NO: 237382 - RNA, 61 nt, Homo sapiens
aaagaacaggagaagcgaacacaagaaggaaccagcaaagcgccacgaagcacaagcaaga

SEQ ID NO: 237383 - RNA, 80 nt, Homo sapiens
agaacggaaaaacaacaagagcacaagaagcacaagaagcaaacaccagaagcccaaggaacgcacaccagcaccagccc

SEQ ID NO: 237384 - RNA, 81 nt, Homo sapiens
ggcggcagcgggcgggccccgagagcagcagcgcgaaggaagaccgagcacggacaggaacacacccaacccccaggcaaa

SEQ ID NO: 237385 - RNA, 87 nt, Homo sapiens
cgcggagcaggcggaggcggaaagaaagccgcgaggacaaggcaagcaggcagcaagacaagaaacgccccgaaaagaggcagccgc

SEQ ID NO: 237386 - RNA, 51 nt, Homo sapiens
cccagcccgccaggacaccaagggacgagacaggggcagaaaaaccacaga

SEQ ID NO: 237387 - RNA, 79 nt, Homo sapiens
gagcccaggagcgccacgcgcggaaggcagcgcccagcagcgcagaggcaaggcagccccggcacgaccaaggaagcgc

SEQ ID NO: 237388 - RNA, 74 nt, Homo sapiens
cagcagaggcggagcccgcagaccgcagaaggccggagacaccagcagggggccgacgacgagccccgcgagga

SEQ ID NO: 237389 - RNA, 70 nt, Homo sapiens
ggaagacaagaagggagcgaggggcgggaaagaggccaacagaaaaccacgcacacagcaaccacacggc

SEQ ID NO: 237390 - RNA, 54 nt, Homo sapiens
gcgacccaaggccagcacggcccaaagaagagcaggccaaggaacaagaagaga

SEQ ID NO: 237391 - RNA, 63 nt, Homo sapiens
gaccaccgcaccaacgacaacgacccagcgcgaccggcaggcgcccgagcacgccaaccccaa

SEQ ID NO: 237392 - RNA, 74 nt, Homo sapiens
gaaagcgggaagacggaagaaacagcaccaaggaagaagagacacacagaaaaaaagccgagaaacacacaaaa

SEQ ID NO: 237393 - RNA, 69 nt, Homo sapiens
caaagaagccagagggcaggagcagaaggaggaagagaaacaccccgccagccagaagaagagcagggg

SEQ ID NO: 237394 - RNA, 117 nt, Homo sapiens
aggaacagcccggcacagccccagcggagcgacgcagaagacggggacgcaccacgagaagacgcgaggagcgccagaagaagaagagagcgaacaaaggccaagcgcagcgcacac

SEQ ID NO: 237395 - RNA, 79 nt, Homo sapiens
aaggagccaggacaaggcaaaaaagccggcacccaggaacgagagcgacccagaagggagaagacgggaagggagagag

SEQ ID NO: 237396 - RNA, 114 nt, Homo sapiens
cggcggccccaccagcagacgcagccgagacaccagcccgaaacaccaccaaggcaggaaaaacaagggaccccaagaaaaggcccccccaaaggaggagaagaagaaggaaga

SEQ ID NO: 237397 - RNA, 73 nt, Homo sapiens
cacacaccccgcaggacccgccagcagagagcccgggaagcgcagagggaacacggccacgaggggaacggga

SEQ ID NO: 237398 - RNA, 57 nt, Homo sapiens
cagagagaagaaagggggcccagggccaggcccaagcccagcagaccaacagcgcag

SEQ ID NO: 237399 - RNA, 86 nt, Homo sapiens
gcgggaagccccagacgcgccgaggggccgggcacgagcggcgaggacagggccagggaggagcaggaagaagacaaaggcgacca

SEQ ID NO: 237400 - RNA, 70 nt, Homo sapiens
gggacagggggacggacacgcccagccccgggcacggaaaggggaaggacaaacacgaaaaacaacacgg

SEQ ID NO: 237401 - RNA, 73 nt, Homo sapiens
ccgccgaaacaccacgccacacaccagcggagcgcaccggcacaccacaaggaagaaagaagaagacgccacc

SEQ ID NO: 237402 - RNA, 66 nt, Homo sapiens
ggaccgggcccaagccgggggcacgcagccaggccgacagcccgggcaagcagacccaggaacagg

SEQ ID NO: 237403 - RNA, 69 nt, Homo sapiens
cgcccccagcccgaggaggacgagggccggaaggggccgagaacgacagagaccacagagaagcccacc

SEQ ID NO: 237404 - RNA, 75 nt, Homo sapiens
gagcagaagaacaagaaagaacagcacagccaacccggccggaagggggcgccagcccaaagagaaggaggaacc

SEQ ID NO: 237405 - RNA, 75 nt, Homo sapiens
caggaagcagaagaagcgaggagaagaagaggcaagcggcagccacacccggagaaggagccgcccagggacgaa

SEQ ID NO: 237406 - RNA, 69 nt, Homo sapiens
gccccagcgccaccgccgaccgaagccgcaaaaacggaggagaaccgaaaaaagcagagaaaaggagcc

SEQ ID NO: 237407 - RNA, 75 nt, Homo sapiens
aaagcaggccaccaagccagcaacaaggacaccaggcagaaagagcccacaagacaaaaaagcagacggaaacag

SEQ ID NO: 237408 - RNA, 57 nt, Homo sapiens
gaaaccaaggagagcaaacaggaaacgaccagcccaaaaccaggcccaaggaacgag

SEQ ID NO: 237409 - RNA, 78 nt, Homo sapiens
aaggggccccccggacgggacagggcaccggcaaggcagaggggcgggcaaaggagaggcacaggaagcagaggcaag

SEQ ID NO: 237410 - RNA, 50 nt, Homo sapiens
aaacaacaaccagggacaagacaacgcaggccagggacaagacgcgccga

SEQ ID NO: 237411 - RNA, 77 nt, Homo sapiens
caaaacaaaaagagcagaggagacaaaccggagaaggagccaagaaagagaagggaaaaggaccacgaaccaggaag

SEQ ID NO: 237412 - RNA, 77 nt, Homo sapiens
cgaggggagaccgcgccccggaggaaagaccacagcaagaccacgcccccagccgggggaccaggccgaacgacccg

SEQ ID NO: 237413 - RNA, 72 nt, Homo sapiens
ccgcaggcgcggggcgccagggacagccaccggcggccgggacccacagcccacaccgcggacagagcaaac

SEQ ID NO: 237414 - RNA, 79 nt, Homo sapiens
gaacgcaggggagaggagaagagagcggcggaagggggcggagaacggaaaagcaccaggaagcagagaggaccgcaga

SEQ ID NO: 237415 - RNA, 43 nt, Homo sapiens
gcccgggcagcgagcgcaaaagaggagacacacagccccagac

SEQ ID NO: 237416 - RNA, 73 nt, Homo sapiens
gcccaagagaggcaggcagcgacagccacacaacggacaggaggcccagggaccgcaggagacacggacacga

SEQ ID NO: 237417 - RNA, 78 nt, Homo sapiens
gggaccagggcaccaacccagaagaaaaccccacaaaagaggaagcaccagagaacagagccagaaaggaggagcaag

SEQ ID NO: 237418 - RNA, 82 nt, Homo sapiens
aaccaccaaaggggaaacagaaacaaggggaaggaacaaagcagagaaaccaaaaggccagacgaacacgagagggagcgaa

SEQ ID NO: 237419 - RNA, 84 nt, Homo sapiens
gcagccaagcccccacgccagggaggcgagagagccaagaaggaacagcagcagagcccggagagaccgaaaaggcaaggcgag

SEQ ID NO: 237420 - RNA, 73 nt, Homo sapiens
cccgcgccccggcggggggaagcccgcgccgccggcaccagagggacacaaagcgcgggaaagaaccccgcac

SEQ ID NO: 237421 - RNA, 83 nt, Homo sapiens
cgcaggcagccacaaagagggacgaggagcacaaccagacagggccaccgcaggggagagcaccgcccaccacgccaccacgc

SEQ ID NO: 237422 - RNA, 77 nt, Homo sapiens
ccggggccagagaaaccaaaaagaagaaggacggaaacccagcggcggcagaaccagccggcacaaagccgaaccag

SEQ ID NO: 237423 - RNA, 88 nt, Homo sapiens
acccggaaaccagagcaagaccaaggagggcccccggacccgggagcggacccggggcgggaagcccgaggcggcaacggcggccggg

SEQ ID NO: 237424 - RNA, 31 nt, Homo sapiens
aaggccaagcaaggacagaaggacagagaag

SEQ ID NO: 237425 - RNA, 81 nt, Homo sapiens
aaaacgaggggcggaacacccgccaaagcagagaaaaggaaagggagcagcaccggccacacccacagcacgaccggaacc

SEQ ID NO: 237426 - RNA, 83 nt, Homo sapiens
acgcccccacaacaagagcccaaccaacagcccaggccgccgacgcacgagaaggagaggaagaagcggggagagaccaacaa

SEQ ID NO: 237427 - RNA, 75 nt, Homo sapiens
gaaccaggaaagccacaggaggccaccagaacccaagaagaccgaaagaaacacgggccaggccgccacgaaaac

SEQ ID NO: 237428 - RNA, 78 nt, Homo sapiens
cgaaaaaccggagccaacgaaacaaaaagcaggcaacaggacaacgcgggcaccaccgagcaggccagcggcagaaag

SEQ ID NO: 237429 - RNA, 70 nt, Homo sapiens
ggacacggccgcaaagaggagcaagaaagaaaaagaggaagaggcaccaggacaacaggggagaagaaaa

SEQ ID NO: 237430 - RNA, 69 nt, Homo sapiens
aaagagcgggcaccgcacacaacggcagcgaagaagacaacggcaagcggagaagagcaaggccgaacc

SEQ ID NO: 237431 - RNA, 32 nt, Homo sapiens
cacacaacgcaaggaaagaggacaaagccacc

SEQ ID NO: 237432 - RNA, 56 nt, Homo sapiens
gacacaccgcgcccgcccaccagggaacaagagccaacaaggccccaggcaggggg

SEQ ID NO: 237433 - RNA, 87 nt, Homo sapiens
caaggccgaggccgcagagagacaagaacaaacggacaccacaaagagacggaggagcggaaggcaagcggcagcagacagaggcac

SEQ ID NO: 237434 - RNA, 78 nt, Homo sapiens
agcggagcccgggcggggcaggagccgggcggagaacggaaaagcaccaggaagcagagaggaccgcagaagggaagg

SEQ ID NO: 237435 - RNA, 57 nt, Homo sapiens
gcggggagcgcggaccccggccgggacgcgcagggaacgcccagcgacccccacgcc

SEQ ID NO: 237436 - RNA, 84 nt, Homo sapiens
gaaaagcaccacccacggagcggcccggcacgcgccagcaggcaagaaggaaggaagacccacaagagaccacgcagagacagc

SEQ ID NO: 237437 - RNA, 65 nt, Homo sapiens
gcgccagcgcagccgccagcgccgggccccccaccagaaagagcagagccggaagcgcgcagcga

SEQ ID NO: 237438 - RNA, 48 nt, Homo sapiens
cgcagggcgcccccgggagagaagaccggggaaaggagacgcgccgag

SEQ ID NO: 237439 - RNA, 54 nt, Homo sapiens
ggcagcaaggcgagaagaaagaggccagacaggagaccgagggcagaggcaacc

SEQ ID NO: 237440 - RNA, 76 nt, Homo sapiens
aaacccgcgagcaggaaccccaggaaacggccagggaaccaagaccaggacaaagaagacccggagagacaagccg

SEQ ID NO: 237441 - RNA, 74 nt, Homo sapiens
aaaaagaggagcccgcaagaggccagcgaaaaccgaagaccaagaggagcggggaaaagagggccgagaagcgg

SEQ ID NO: 237442 - RNA, 73 nt, Homo sapiens
gaaaacaaagagaagggcccagaagcaacggacaagcaaaacagacccgccaacaagaggagcaagagggggg

SEQ ID NO: 237443 - RNA, 85 nt, Homo sapiens
ccagagccgagagagcagaaccgcgcagcagaagaggaagaggcagaaaccaggcagaacgaacgggaaagagcagaaaccacaa

SEQ ID NO: 237444 - RNA, 79 nt, Homo sapiens
ggcaccaaccacagacacacaggaggggaagagcacccagacaaaggaagaacgccaccgagaagcgccaccaacaacc

SEQ ID NO: 237445 - RNA, 69 nt, Homo sapiens
gagaggagaggaccgagaagacagggacagaggccgaccacgcacgcgcagcccaaaaaggccaggccg

SEQ ID NO: 237446 - RNA, 76 nt, Homo sapiens
caaaaaggcgacccccaccaccagcacccggcagccacagcccgcggacggaaggacaccagcacaagcggccagc

SEQ ID NO: 237447 - RNA, 77 nt, Homo sapiens
ggacaccagcagccgcgcggagcgggaggaggaccgaaagcagacaaaacggcgacacaaaaagagcgaaagagaga

SEQ ID NO: 237448 - RNA, 75 nt, Homo sapiens
cgcccgcccggacacgcggcaaagacaggggcaacacgccgggccacccccccaaccagcggcccggagagcccc

SEQ ID NO: 237449 - RNA, 83 nt, Homo sapiens
gagcccgagccgcgggaagaggcggcgccgccacccccccccagcagggagaagcccaccacgcaacgggacggcgcggcgga

SEQ ID NO: 237450 - RNA, 74 nt, Homo sapiens
acagaacaaaaacccagagcagcgcggccagccaagagagacaaagaaaagaagacggaacgaagagccacaac

SEQ ID NO: 237451 - RNA, 62 nt, Homo sapiens
aagcgacgagccgcgaggaggagacgagagggccccaaagggaccagggacgcgcccgcgcg

SEQ ID NO: 237452 - RNA, 70 nt, Homo sapiens
accaaaaggaaaccccagaagcccggagaacccaggacacacagcaacgaagcaggggaggagggaagac

SEQ ID NO: 237453 - RNA, 50 nt, Homo sapiens
ggagggagccaaaggggcggcagagaggccccgagacccagaacgcaaaa

SEQ ID NO: 237454 - RNA, 57 nt, Homo sapiens
cccgcgccgcgggaccccggcacgcccaggccgagcacgacaccggcaccaccaggc

SEQ ID NO: 237455 - RNA, 39 nt, Homo sapiens
aaaccgggacacggccagagagacggcaaaaacagagag

SEQ ID NO: 237456 - RNA, 67 nt, Homo sapiens
cgccgcccggcaaacacggaaccaccgcgaggccaaggggaaagaaggaccacgcggaaaaaaagcg

SEQ ID NO: 237457 - RNA, 43 nt, Homo sapiens
caagaacaaagcgccccaaaagcaggaccagacggagccaaag

SEQ ID NO: 237458 - RNA, 53 nt, Homo sapiens
caacgaccagacagcaacccaacaaccagaccggagagaacagaaaaaaagcg

SEQ ID NO: 237459 - RNA, 80 nt, Homo sapiens
gagacaccagccccggcccagagacaccgcccccagaaccaggaagacagcgcccagcaacccggcacccccaaccgcac

SEQ ID NO: 237460 - RNA, 83 nt, Homo sapiens
ccaccgcgacccgggacccgcccgcccgcgggaggggaggagagcagaagccgaggaaaagggagggcccgaaaaaaccaggg

SEQ ID NO: 237461 - RNA, 67 nt, Homo sapiens
aaaaacgcagggcaaaagcggacacaaagcaaagcgcagaaccggccgaaaagcacaaacagcaaga

SEQ ID NO: 237462 - RNA, 74 nt, Homo sapiens
aaagggagcgaggaccaggaagcacaaagggaccccagccgacgaaccacggagggaaagacaaggagccgggc

SEQ ID NO: 237463 - RNA, 70 nt, Homo sapiens
aaagaggaacccgcgacccgggcacccagagcagggagggaagaagagcaccggcgacaaaggacagcca

SEQ ID NO: 237464 - RNA, 79 nt, Homo sapiens
caggcggcgccgcacccacaacagccagcagcccccgcgacgagcccccaacgagccaccaacaggaacagacccgaca

SEQ ID NO: 237465 - RNA, 86 nt, Homo sapiens
agcgcccgcgccagcaccggagaaacgaggggagaagacggggcgaggaagacaccacccagagagcagagcgacacgaaaagaca

SEQ ID NO: 237466 - RNA, 59 nt, Homo sapiens
cagagcgagaggaaggggggggaaagccggggccccggggacccgcggcacggacaggc

SEQ ID NO: 237467 - RNA, 58 nt, Homo sapiens
agaccccaaccacacaccaggcagggcggacgggccccgaagcccaaggggagaccag

SEQ ID NO: 237468 - RNA, 83 nt, Homo sapiens
ccaagccaaaaaaacaccccgcacgagagagcagcacgcaggcaggagaggaggagggcccgccccggcggccacaggcaagc

SEQ ID NO: 237469 - RNA, 71 nt, Homo sapiens
aggccggccagacagcgaaggagggagaagcacgcaacgagggagacagaaccagggggaaggccccgggc

SEQ ID NO: 237470 - RNA, 71 nt, Homo sapiens
ccaggaaggagccaaagcacaagaagaagacgagcgccgaaaagcgaaaagaaacaagccgcggcaacagc

SEQ ID NO: 237471 - RNA, 49 nt, Homo sapiens
gggggggacaaagagggaacagaaacccagaaagaaaaggagaaaaggc

SEQ ID NO: 237472 - RNA, 77 nt, Homo sapiens
gcacacagcgcgcaacgcgggagagcccgggccacccccccaggcaagaaggaaggcccgaagccacagagcggaag

SEQ ID NO: 237473 - RNA, 72 nt, Homo sapiens
gcgacagagagaggcagccaccggaaggccgcgggggaaggaggacgcagagagggcacacggggcgaagga

SEQ ID NO: 237474 - RNA, 70 nt, Homo sapiens
gcccccaggaagaaccccccaacccgcaaggcaagggaaacggcccccgccgagcagagaaagggggagg

SEQ ID NO: 237475 - RNA, 67 nt, Homo sapiens
agaaggaccaagaaccagaaccagaagacaaccagaagcaccgcacaggaaaagaaaggagaacagg

SEQ ID NO: 237476 - RNA, 75 nt, Homo sapiens
caggcaaagggacagcacagagggcagagccagaaggagagccaagcgccagagaacaggaggaggcaggcgcgg

SEQ ID NO: 237477 - RNA, 70 nt, Homo sapiens
aaaggccagcggaggaagaaggaggcgccaccagcaaaaccagagaaacaggcagagaaagacacccggc

SEQ ID NO: 237478 - RNA, 63 nt, Homo sapiens
cccggaaccgcccccggaaagcaggaaccaaaaacaggaagaagaaagacagaagagagcaga

SEQ ID NO: 237479 - RNA, 73 nt, Homo sapiens
gcgccccacagaggggcgacgcggccacgcccggcaccgagcacagcaaacgcccggcgcgcccaccagccag

SEQ ID NO: 237480 - RNA, 73 nt, Homo sapiens
cgaaaaacggcacacccaccaagcacccaacagaagaagaggagccaggaggaggaaaggacaggcaacaagc

SEQ ID NO: 237481 - RNA, 77 nt, Homo sapiens
ggccgccggaaaaggaggacaggagccacggaaagacaaaagaagaacggcccaccgccaccacccaacacaacccg

SEQ ID NO: 237482 - RNA, 84 nt, Homo sapiens
cacagcggacggggaccacacagccagaacagggacgccagccgcagaggaagacccggccacccagaggagaaggccaccccg

SEQ ID NO: 237483 - RNA, 82 nt, Homo sapiens
ccccagcccacagagagcaaaacacaagagagcagggaggaggggaccccgaagcaggaggcccaaggaacagcacagcagc

SEQ ID NO: 237484 - RNA, 89 nt, Homo sapiens
agaagaaacaacaagagaaagacccaggaagcagaagaagcgaggagaagaagaggcgcagacggggaagcggagccaacagccagggc

SEQ ID NO: 237485 - RNA, 66 nt, Homo sapiens
aagaaaggaccccagaggaagacggggcccaaagaggaagggggaaaggaccaaaaaaaaggaccc

SEQ ID NO: 237486 - RNA, 34 nt, Homo sapiens
ggggaaggcggcagcgaaccagccggccgacgag

SEQ ID NO: 237487 - RNA, 88 nt, Homo sapiens
acgacaccccacccagacgaagacagcccggacaccgacagcacagacagaacccgcaccaccaggcggcacccagggccggcccaag

SEQ ID NO: 237488 - RNA, 72 nt, Homo sapiens
ggagaaggaccaagaaccaggaaagagagcagagacagaacggaaagggagaaggagaggaaagcagcaggg

SEQ ID NO: 237489 - RNA, 73 nt, Homo sapiens
ccaccaggagacaaaacccacccagcagcgaagagcaaaggacccaccacgagaaacaagaggcagcacaggg

SEQ ID NO: 237490 - RNA, 64 nt, Homo sapiens
gaagccaacagcgaggccagcggaaccacccaccgagggaccagggcgacaggacaacggacag

SEQ ID NO: 237491 - RNA, 78 nt, Homo sapiens
gagacagaagagcaaaaggaaccgaggaaaagccgcggagcgggacccagaacgcgaggcagaggcccacagagggac

SEQ ID NO: 237492 - RNA, 65 nt, Homo sapiens
aaggccccaaacaagagagcagcgcggacacagagaggacgccgccagccaccggcgcgaagcca

SEQ ID NO: 237493 - RNA, 78 nt, Homo sapiens
cgggcaggggcccagaccaacaccaagaagccggcccagcgcgcgagccggcggggcacaggaaccgccagaacccaa

SEQ ID NO: 237494 - RNA, 63 nt, Homo sapiens
cggcgccggcggcgcgcggcccccgcgcagagagccacaggccgcacaccccagagcccgaag

SEQ ID NO: 237495 - RNA, 67 nt, Homo sapiens
aggaggaagcgaggccagacagcaagagcacccgacccacaggccagagagaaccagaagacaaaaa

SEQ ID NO: 237496 - RNA, 82 nt, Homo sapiens
ccggcaagacaaacgggaaagcgaaaacaccccacgagggggaaggagggccgcacaggcagaaaaacgccaagacacgccg

SEQ ID NO: 237497 - RNA, 43 nt, Homo sapiens
gccggggaaggcggcaggccaaaacagaagaggcaaagcccag

SEQ ID NO: 237498 - RNA, 67 nt, Homo sapiens
gaccagggaacaacgggagaaacagcaacgcgaaagaacagaccggcacaggaaaagcgggagagcg

SEQ ID NO: 237499 - RNA, 75 nt, Homo sapiens
aaaggagaccccacgacacacaagaaagacaacgaaacggcaaaccgagccacgcaaaagaaaaggacgggagga

SEQ ID NO: 237500 - RNA, 79 nt, Homo sapiens
aggaacggaacagccaccaggacaagagggcccaagccaaaaccgggaaagacaaggagccgggccgagaaaccgaacc

SEQ ID NO: 237501 - RNA, 71 nt, Homo sapiens
gaagccaccgcaaaaagcccaggaacaccggagggcggccccggagggacagccgggcagggcgcgcgcag

SEQ ID NO: 237502 - RNA, 80 nt, Homo sapiens
gacccagacccggagcccagggaagcagccgaccagccgcggagccgggggcaggcccggaacgggacccagggacaaac

SEQ ID NO: 237503 - RNA, 60 nt, Homo sapiens
agcggacacgcccgggcagggcccaccccgcgcccgacaggaaggcgggaaggcgagggc

SEQ ID NO: 237504 - RNA, 73 nt, Homo sapiens
gccgagaaggcagaggcggcccaaaggagcgaggcggggaagggaggaagagcgggcaggggcggagaagaag

SEQ ID NO: 237505 - RNA, 62 nt, Homo sapiens
ccgggcaggaccccgacagcccgcaagaaccgcagccccaaggacggcgaagacccaacagc

SEQ ID NO: 237506 - RNA, 79 nt, Homo sapiens
ggaaaaaccaggagacacaaacagaaaaggaagaaagggacaaagagaggagcagagccagccccaggccgcgagccgg

SEQ ID NO: 237507 - RNA, 56 nt, Homo sapiens
ggccccggggcgagcacggaaaggaacccacaccacggacaagaccaaaaggaccc

SEQ ID NO: 237508 - RNA, 69 nt, Homo sapiens
agagcgcgagaggacgggacagcgacccacggaacccaccgacacaacaacaaagaagaaaagccagca

SEQ ID NO: 237509 - RNA, 62 nt, Homo sapiens
gccgacccccccgccggggagggcccagcgcaccgacagcggaggcacccaccacgggccag

SEQ ID NO: 237510 - RNA, 86 nt, Homo sapiens
ggagcgccgcaggcggcggccgagggcgcgcggaccccccgcgagagccggaaccagccaagaaccacggccacaccccaacacaa

SEQ ID NO: 237511 - RNA, 74 nt, Homo sapiens
aaggggcagcaagacacgggagagggcaccccagggaagcagaaagggaacgcccacaaacagcacgaagccag

SEQ ID NO: 237512 - RNA, 73 nt, Homo sapiens
ggacagacgggcagcggaacaccagcaggaaaaaagagcggcagaaggccaaacggccgagcaggcgagcgaa

SEQ ID NO: 237513 - RNA, 82 nt, Homo sapiens
cggaagacccaaagcgaggaggaggcaaaacagacagaacgcagaaagcaggcaccgacagaccaagggaggagagaccccc

SEQ ID NO: 237514 - RNA, 80 nt, Homo sapiens
aacaacagcgaggaagaagaggacgacgacgacgaggaagaggaggcgaggaagaccgggagcacagaagaaaagaacaa

SEQ ID NO: 237515 - RNA, 76 nt, Homo sapiens
gccgcaccccagagcccacacccgcagagcgaggaccggaagaggccaccaaaaagaggaagcagcgaaacacgcc

SEQ ID NO: 237516 - RNA, 61 nt, Homo sapiens
gccaggacaccggaaccgggaaaggggcaggacccgaggcgccagcagcagcaagaccggg

SEQ ID NO: 237517 - RNA, 57 nt, Homo sapiens
ggaggcggcggcccagccacgagacaggcagccagcgaccccagaccgaaggcaggc

SEQ ID NO: 237518 - RNA, 54 nt, Homo sapiens
cagccaggcgcaaacaacgcagcaacaggagacagggaaacaaagcaaagaaca

SEQ ID NO: 237519 - RNA, 61 nt, Homo sapiens
acccaaccgaacacgacgcgaagaaaacaggaaggaagaaacacagaaaaggggcaacccc

SEQ ID NO: 237520 - RNA, 72 nt, Homo sapiens
agcaggagaagaccaacacaggggacagaggaaaaccagcaggaaaaagacacaccagagccagacaagcag

SEQ ID NO: 237521 - RNA, 78 nt, Homo sapiens
ccaggccgcgccaagccgcccgagccgggcacgagcggggcccggcgcacccaccaccgccgcccacggcagcccagg

SEQ ID NO: 237522 - RNA, 54 nt, Homo sapiens
ggaccacccagaggagcaacggagcccgggagaaagacaggcaacggaaaacca

SEQ ID NO: 237523 - RNA, 71 nt, Homo sapiens
agccccaggccccagcgcgagagacacaggaacgaaccaaaaacgcagaaaacagcacgagagaaaaccag

SEQ ID NO: 237524 - RNA, 81 nt, Homo sapiens
cacagacgcagccacgcggcccagaaacagacaagcaagcagagacacacagcaaaagccaacacacagagcccgagaagc

SEQ ID NO: 237525 - RNA, 77 nt, Homo sapiens
cgccgaccccccggcgccgcgccggcggcggacggacagcgcaggagaagagggccacaagcgaaggcaaaaccaaa

SEQ ID NO: 237526 - RNA, 89 nt, Homo sapiens
gccgaggcaccgaggcaccagaggagcagccaggcaagacaggccaacaccgccaccagagaaccacacaaaggaaaggggacaagacc

SEQ ID NO: 237527 - RNA, 80 nt, Homo sapiens
ggcggagcaggccaaaggaagaagggacaaaagggagacaccaccagaacaggccggcgcgcgggaaggcacacaacaca

SEQ ID NO: 237528 - RNA, 80 nt, Homo sapiens
cggccccggcccgcgcccgcccccggccgggcggacggggggaagaaaagaaggccccccacccgaccaacgaggccgac

SEQ ID NO: 237529 - RNA, 66 nt, Homo sapiens
ccaaaggaacacaacaaaagaaagggcagcaaccaagaagaccaggggggaaccgcgacccaaccc

SEQ ID NO: 237530 - RNA, 65 nt, Homo sapiens
cgagaagggaacagcaaaacaaaggacaagacgacaagcccgacacccagcggcaccggacagag

SEQ ID NO: 237531 - RNA, 73 nt, Homo sapiens
gagaaaaccgggcgcagccgagacaagcgcaagcagccagagcccgggcgcaaagaaccaggcccggaccaga

SEQ ID NO: 237532 - RNA, 74 nt, Homo sapiens
agagagaaacccgaagcgcggaaaacccagggggcgaacacggaaggaaagggccgagaaagaagagaggaaga

SEQ ID NO: 237533 - RNA, 77 nt, Homo sapiens
gacaagcacacacaggcgcgaaacggaaaaagacaagggaggcgaggacggacaaaaggaaacggacgggaggccag

SEQ ID NO: 237534 - RNA, 83 nt, Homo sapiens
ggggcgcaggaggcgggcacagcgccaagccacaacacagcagcccccaggagagcaggaaaagccggagaagccaacaggcg

SEQ ID NO: 237535 - RNA, 56 nt, Homo sapiens
gacccagcaggaccgggccagggcaggacaaggacaagaggccgaagaaggagcac

SEQ ID NO: 237536 - RNA, 68 nt, Homo sapiens
ccagcgcgccggagccgccgagggaccaggcagacgaccaaggagcaggcggggcaggcccaaaacag

SEQ ID NO: 237537 - RNA, 74 nt, Homo sapiens
cacaaagggagggggcagcccgcaggagcaagcgcagcaccaccaacagagccaagcagacaaagccaagaaaa

SEQ ID NO: 237538 - RNA, 59 nt, Homo sapiens
agggccagagggaaggacaggagagccacagcgaaacaacacaaacaaaaagagaacaa

SEQ ID NO: 237539 - RNA, 83 nt, Homo sapiens
gaagggaaggccagcagcgcgcggagaagaacggggagccagggcgcggaggcgcggggcgccccgaggagcggggaggccgg

SEQ ID NO: 237540 - RNA, 71 nt, Homo sapiens
caacaaaaggcaacaacaaagcgacacggacgccaaaaagacccaacaaaggccaaacccgcaccgagcag

SEQ ID NO: 237541 - RNA, 75 nt, Homo sapiens
gaaggaggccccgcacagccagaccggcggaaaaaggcagggaaaaaggcagccgaccagaaaagagggacagca

SEQ ID NO: 237542 - RNA, 49 nt, Homo sapiens
caacacggaggaagcggcgcacagacacacagcccaccaaaggacaacg

SEQ ID NO: 237543 - RNA, 67 nt, Homo sapiens
aaccagggaaaaaagaaaagagagaccccacaggccggaaggggagcaaagaagaaaacgcagccac

SEQ ID NO: 237544 - RNA, 79 nt, Homo sapiens
cccgcggcggcgcgccacccgccccgcaggggcccgccagcggacagccgccgccaacgacagcccacgagcgacagga

SEQ ID NO: 237545 - RNA, 58 nt, Homo sapiens
gacaggaacacaaggccggccaccagcagggagggcgggggcggcagagggcacgccc

SEQ ID NO: 237546 - RNA, 81 nt, Homo sapiens
cgggaaaaaagaagaccacggggccgccaggaaggagcagcgaaaggacgggcaccccgggaggagagggagcagaaccgc

SEQ ID NO: 237547 - RNA, 71 nt, Homo sapiens
cagcaacgacccaaaggagaggaaggaacaaggagggaagcggacacacaggacgagaaacccgaccacac

SEQ ID NO: 237548 - RNA, 59 nt, Homo sapiens
agaaccccagaaacagaaagcagcacaaccggcaaggcaaggaggaccaagcgaaaaac

SEQ ID NO: 237549 - RNA, 50 nt, Homo sapiens
gggacgagcagagaacagcaaaagagcacaaggcacccgcgagcccacgg

SEQ ID NO: 237550 - RNA, 54 nt, Homo sapiens
gaaccgccaaacccgcagcaccaacagggagggacacaggagagaaccagagaa

SEQ ID NO: 237551 - RNA, 75 nt, Homo sapiens
ccgcagggagaccaccgccacacgagaccgacggggagacaaaagacagccgagagacgacgggggacagaagag

SEQ ID NO: 237552 - RNA, 71 nt, Homo sapiens
caaacaagaggccggcaggaaggcgcaaaaaccagacaccccacaccaccacccagacgaccaaaagggca

SEQ ID NO: 237553 - RNA, 57 nt, Homo sapiens
aagagggaagcggcaaaccaaaagagcaacggaacaccaccccagagcaagcccaag

SEQ ID NO: 237554 - RNA, 63 nt, Homo sapiens
aggaggccccaaagggcgagggagaaaacgggccggaggaaaagggcggcaggggaccaccac

SEQ ID NO: 237555 - RNA, 66 nt, Homo sapiens
agcccccaaggaggcgacgaaggacacgcaacccccagcacagagagacccggagcaacaagccca

SEQ ID NO: 237556 - RNA, 68 nt, Homo sapiens
gggaaggggcagcaagacacgggagagggcaccccagggaagcagaaagacaacccgcacacagagaa

SEQ ID NO: 237557 - RNA, 82 nt, Homo sapiens
aaacgcggagggaaagcgggaacgagagggccgacgccaccgccgagcccagaccggaacagacggggggccaacaaagaag

SEQ ID NO: 237558 - RNA, 83 nt, Homo sapiens
gcagggggcacccgcggccggcccggggccccgggaccggcgcccccccgaacaaacggacccaggacaaaacgacaccagcc

SEQ ID NO: 237559 - RNA, 74 nt, Homo sapiens
gaagaagagacgagaagagaaagaagcgaaggagccggaaggggcaccagcagccaaccgcggcagaaagggaa

SEQ ID NO: 237560 - RNA, 62 nt, Homo sapiens
gaaggaccaagaaccaggccagaccggaccgagacagccaccaaaagacaggggcagagagg

SEQ ID NO: 237561 - RNA, 78 nt, Homo sapiens
gggaggacacgacgcgcaaaggggccaaccgccccccagcagcaggcacgggcgaaccccgagccccgccccacgccc

SEQ ID NO: 237562 - RNA, 88 nt, Homo sapiens
agagaaggagcggagcgccaagcccggccaaaaagaacgggaagaacagcccccacagagaaacggaagggaagcagccgcgggaagg

SEQ ID NO: 237563 - RNA, 57 nt, Homo sapiens
gaccagggacgcccccaggcccgcccagggccaagccgcccgccaaccggcagcgcc

SEQ ID NO: 237564 - RNA, 74 nt, Homo sapiens
agggcgaaccggcaaccaccaccaggagccagcacgagggcaaggggacgcgagaaaggccgacagaacaggcc

SEQ ID NO: 237565 - RNA, 72 nt, Homo sapiens
cggcggagaacagacaagcccaggcaaagcagaggacacaaagcaggagccacggcggggaccaagagaaga

SEQ ID NO: 237566 - RNA, 72 nt, Homo sapiens
gaacgcccgccccgcagagaggggagaaaacgcaggccacaaagacaggaccaagaggaaaaaacaaccgcc

SEQ ID NO: 237567 - RNA, 77 nt, Homo sapiens
gcgccggcgccgcggccccggcgcggacccgccaccggaggaggccggggggggcacagagccccggaagacagccc

SEQ ID NO: 237568 - RNA, 65 nt, Homo sapiens
gacggccggcaggccgccgccgagcggaaaccccccaggcaagaggcgcaggaccgggaagacca

SEQ ID NO: 237569 - RNA, 91 nt, Homo sapiens
cgcccaaaaaagcacgcggaggcagcccaaccggcagaagggcaccgccgaccgaaaccgcaaacacacgacagaggcaaggcaaacacga

SEQ ID NO: 237570 - RNA, 66 nt, Homo sapiens
cacacagaggcagacaaaaaccccaagcaagcagggacaccaagaagccacagaccaaaagcgaag

SEQ ID NO: 237571 - RNA, 39 nt, Homo sapiens
agcccaagagagcaaagacccagaagaaccacgcgcagg

SEQ ID NO: 237572 - RNA, 69 nt, Homo sapiens
agcgcacacaaaagaggagaaaaccgggcgcagccgggaagggggaacggagaagagaagaaggaaggg

SEQ ID NO: 237573 - RNA, 68 nt, Homo sapiens
ggggaaaacgccggccgaacagcccacgccaaggaaacggagcacccaccaacgagagagccgcaggg

SEQ ID NO: 237574 - RNA, 81 nt, Homo sapiens
ccaaccaaagacgccaaggagaaggcagaccggggccagcggagcgaagccacagaacaaaaacgaccgaggaaaggcgag

SEQ ID NO: 237575 - RNA, 78 nt, Homo sapiens
agcgacagaaagagagcgggggcagcgacagagccaaaacagagcggaaccgaggagagaggcaccccagccgaagcc

SEQ ID NO: 237576 - RNA, 79 nt, Homo sapiens
gagacaaaggagaacagggcagacccggagcccaagggcaccaaagcgaaggagcagcaaggccccggacaaacagaca

SEQ ID NO: 237577 - RNA, 72 nt, Homo sapiens
gcgaccggaccaaaggcaaaagccaaaagaagcaagggaaagaccaggagccagaaaccaaccaaagaggga

SEQ ID NO: 237578 - RNA, 81 nt, Homo sapiens
aggcccgaggaggcgaaccggcgggacagagccacagaaccgccaccaggaggagcaacgggggaagccccgaggaagcag

SEQ ID NO: 237579 - RNA, 114 nt, Homo sapiens
cccgaagaagaaagccaccgccacagagggcacagggggggagcacagcgacggagagggcggggacacagcgggcaggaagaagacgccgaggcccccccacccagaaccgag

SEQ ID NO: 237580 - RNA, 78 nt, Homo sapiens
gaggcccagcgcccccgaaaagcaaggcggcaagccagaagcaccgaggacagaacaacagaccgagaagacaaccac

SEQ ID NO: 237581 - RNA, 61 nt, Homo sapiens
gcagcgcccccaaacgacccaggaaaaaacaagggcgagaaaaggaggcgccgaccagccc

SEQ ID NO: 237582 - RNA, 35 nt, Homo sapiens
agccagcaagcccaagccaggaaggagcacaacag

SEQ ID NO: 237583 - RNA, 79 nt, Homo sapiens
cgccccagagcccagggcaggacaccgacaggaacagggaccacggggggaaaacaccacggcagacacacggagaaaa

SEQ ID NO: 237584 - RNA, 77 nt, Homo sapiens
gagaggaaaacagaagcgggcaacaccaaaacggcgggagcgccccgcaggggaacagaaccacaaacgaagcagaa

SEQ ID NO: 237585 - RNA, 70 nt, Homo sapiens
ccgagggagcccacgagagaaccccagagggcgcggaagccccagcaaacaagaccaccggcacccagaa

SEQ ID NO: 237586 - RNA, 82 nt, Homo sapiens
gcgccgcccggggcagaccaggcaggcaaaagcagaccggaaaacccaccggcaagaccacacccgaggggagcccaggaca

SEQ ID NO: 237587 - RNA, 78 nt, Homo sapiens
cacgcgaccacaaggaacgaggggccccaagagcacagaccagcagccgccaaaggaaagccaggccagaagaaggaa

SEQ ID NO: 237588 - RNA, 68 nt, Homo sapiens
aacaacggcccacccagcacaacaaaccccgcgccccagaagggaaggcagagccacgaggagggaga

SEQ ID NO: 237589 - RNA, 56 nt, Homo sapiens
ccccccccgccgcaccagaacagaaggagcggcggacacacagacccccaccaagc

SEQ ID NO: 237590 - RNA, 78 nt, Homo sapiens
acccggcccagcgacccgaccccgcgcgacgacccgccgccgccgggcggaggcaaaagcagaccggaaaacccaccg

SEQ ID NO: 237591 - RNA, 52 nt, Homo sapiens
gagcgacccaaacaaagagcacgcccggccaggacacaagaggaggcaagcg

SEQ ID NO: 237592 - RNA, 79 nt, Homo sapiens
aggaaagcgcccacgaaaacggcaggacacggggaaagaagaacccaccaaaaggcgagacagcaacgagaaaacaaag

SEQ ID NO: 237593 - RNA, 58 nt, Homo sapiens
ccgcaccacgcgcccacacagggaaaccgccggggaaagcggcccgcccggaaccaca

SEQ ID NO: 237594 - RNA, 68 nt, Homo sapiens
cgagcgacaacgggacgggaaacggaggagcgcacagcacagccaaaaacagaaaccacgccaagcgg

SEQ ID NO: 237595 - RNA, 88 nt, Homo sapiens
ccgggcgccgccaagagccgaggcaccaagcgaaggaggcagaagggaaagaaccgagccccaagagaccaggccgggcagccaaggc

SEQ ID NO: 237596 - RNA, 69 nt, Homo sapiens
acaggcacacagcaacagaagaccggccgcgccaggcaagacaggccaacaccgccaccagagaaccac

SEQ ID NO: 237597 - RNA, 76 nt, Homo sapiens
ccaccaaggagcccaccggagagcagagagcggaaaacggcgcagccaacaagggggaagcagagccccgggccgg

SEQ ID NO: 237598 - RNA, 43 nt, Homo sapiens
accaagaagccagcaagcggccaggacacaggcccacgggaac

SEQ ID NO: 237599 - RNA, 74 nt, Homo sapiens
aacaagccgggaaagggacaagaagggcaaagccgaacccacacaggaaggcaccccagaaaccaacagcaaac

SEQ ID NO: 237600 - RNA, 68 nt, Homo sapiens
cagaggccagcccacagcagaaggacaggagagacaacggaggcaagaaagacggagaagcgagaaga

SEQ ID NO: 237601 - RNA, 61 nt, Homo sapiens
aagagacgacaaaggagaggaaaacagccacccgagaaacgagaggagcgagcaaccgacc

SEQ ID NO: 237602 - RNA, 77 nt, Homo sapiens
caaaaggacgaagggggaagagaacgcaagcacaggaccagaaacgaaaggcagcagaagaggaaagccagaaagac

SEQ ID NO: 237603 - RNA, 60 nt, Homo sapiens
gccccggagggagacgcgcgccgaggagaacccagcgggcgccaaagggggaacaaacga

SEQ ID NO: 237604 - RNA, 76 nt, Homo sapiens
caaaaacagggaaagggccagcacaggagaggccaaggaaaaggaacagagagagcagaaccgaaacggggaaaga

SEQ ID NO: 237605 - RNA, 73 nt, Homo sapiens
acggagccgcgccccccagccgcccgggcaggagcaacgcacgaaaacgcacgaggagcacagaaacgcacag

SEQ ID NO: 237606 - RNA, 75 nt, Homo sapiens
gggagccggagaaccgaaccgacacagacaaagagagagacgaacgcaacagagaggcaacagaccagacaggaa

SEQ ID NO: 237607 - RNA, 76 nt, Homo sapiens
cgcgcaaaggccccggcaagaaggcgagaacgcggacaagcaaacaaagaggaaaaagagggcaacagcgaaggaa

SEQ ID NO: 237608 - RNA, 68 nt, Homo sapiens
ggcaaggcgccagaccaaggaggcgaggcaagcagacccacacgccggcaaaaccgcaaagccgaaga

SEQ ID NO: 237609 - RNA, 79 nt, Homo sapiens
cggaggagcaagccaccgccaaaaggcaaaggacgcagcgccccaccagccggaaaggaacgcaagcacaggaccagaa

SEQ ID NO: 237610 - RNA, 68 nt, Homo sapiens
aaacagaagcgcggccaagaggggccgaggggcgcggaagagagcaccaggggccgccacagccggaa

SEQ ID NO: 237611 - RNA, 64 nt, Homo sapiens
gcccgaggaggcagggcgagggagggcgaagacaggacggcccaggcagacacggaggaggagg

SEQ ID NO: 237612 - RNA, 80 nt, Homo sapiens
gggacccagccagcccgcgcccgcgccgcgcgcagcgccggcccgaaaccgggccgaagacgcacacggagcagaggaaa

SEQ ID NO: 237613 - RNA, 52 nt, Homo sapiens
acgcccaagggcagcaagaaagggaaggggcaagaaggaacagacaaaaacg

SEQ ID NO: 237614 - RNA, 77 nt, Homo sapiens
gacccagaaagagcaaccggagcagcagaaacaacggacacccccgggaacccaccaaaaaggacaccgaaagacgg

SEQ ID NO: 237615 - RNA, 106 nt, Homo sapiens
gccccaacacacggccacagccacagaggacggagcgccgccgccgggaccccgcccagcagaaaacaagccgacagaagaaagcagacagagagagggcaccacc

SEQ ID NO: 237616 - RNA, 76 nt, Homo sapiens
cgcggcgcgcccccgcgccccccggagccccgggccagaggagaagacagaggagccagaccaagagacagcacag

SEQ ID NO: 237617 - RNA, 78 nt, Homo sapiens
gccagaggcaccagaagagcaagaacacaggacaagcagcagcggacagagcgggagccaccagcgccaaagggaagc

SEQ ID NO: 237618 - RNA, 83 nt, Homo sapiens
gagaagagggacaccccaaaacagcccaccgggaacccacgcccacgcgcccacccaggcccacgcggcaggagaggcaacgg

SEQ ID NO: 237619 - RNA, 69 nt, Homo sapiens
aaacacaaacggacggcggagaaggccagcaacccacgcagaaaaacacaaaccgacccagcagaccac

SEQ ID NO: 237620 - RNA, 73 nt, Homo sapiens
acaagcgccaccaaagcaaggagcccgaaacaagaacagagagaagggcgggagaaaccaaggaaagagaaaa

SEQ ID NO: 237621 - RNA, 49 nt, Homo sapiens
caagaacccaggaacgcagaaaaagggaaccgggcagaaaagaagaaca

SEQ ID NO: 237622 - RNA, 74 nt, Homo sapiens
cccgcgccgccgaccccccggcgccgcgccggcggcggagacgagagggccccaaagggaccagggacgcgccc

SEQ ID NO: 237623 - RNA, 87 nt, Homo sapiens
gagagcacgaaggacccagcagggcaccagccaccaaccgcaaaagcacgccacacgagcgcacggccagccgggcaggcagggagc

SEQ ID NO: 237624 - RNA, 79 nt, Homo sapiens
agggacggcacagggaggccagccggagaagcgagcagcgggcgaagcggccaggcccgggcggacgcagagccagagc

SEQ ID NO: 237625 - RNA, 77 nt, Homo sapiens
cacgcgcggagaccaggccagcacgacaaaggaaccaaggggaaaagagacgcaaaccacgaggacagagaagagag

SEQ ID NO: 237626 - RNA, 70 nt, Homo sapiens
ggagaaaggggagcagcaaccaagccaagcccacagaagaaagaacgggcaacgcccagaaagcagcaac

SEQ ID NO: 237627 - RNA, 73 nt, Homo sapiens
aaagcagcccaggcccagacaggagcgggagaaaagaaccgacccacaccaaggacacaccgaagaaggcaga

SEQ ID NO: 237628 - RNA, 82 nt, Homo sapiens
ggagaggaggagagcacagacgccaaaaaaaagagggagcacaggaccacaacggccagagcgagaacaacgaagacagaga

SEQ ID NO: 237629 - RNA, 77 nt, Homo sapiens
cccccagccgcaccaccaaggagcccaaaagaaacagggcgcaggaaaagacgagccaggaaaagcaacaaagggag

SEQ ID NO: 237630 - RNA, 61 nt, Homo sapiens
ggaaaccagcggaggaaaccgagccaggggaaccgaaccaccaggccaaaaagcgccggca

SEQ ID NO: 237631 - RNA, 66 nt, Homo sapiens
aggaaccggggcagcgacaggcagccagcggcccgggagggaacaaagaggaacaggccaaaccag

SEQ ID NO: 237632 - RNA, 51 nt, Homo sapiens
ccacgcacagaaaggcaaccgcaagacaaaagaggagcagcagggacgcac

SEQ ID NO: 237633 - RNA, 68 nt, Homo sapiens
ggaggagaaaaaagccaccacggcacgagcacaacacgaaaggagaagaggacgggaggagaaaagcc

SEQ ID NO: 237634 - RNA, 54 nt, Homo sapiens
cgcgcccgccgacggcagaaccagagaccacagaagaaggaagggccacccagg

SEQ ID NO: 237635 - RNA, 75 nt, Homo sapiens
acgcgacagcccgggggacaccaagccgggacaaccagaggcgaagagcccacccgccaaccggagcagagaccg

SEQ ID NO: 237636 - RNA, 67 nt, Homo sapiens
aacccgcggggcggagagcaccgaagagcacgacgacggagagaggaagaagacggggcggcaccac

SEQ ID NO: 237637 - RNA, 74 nt, Homo sapiens
ggaaagcacccgggaacaacccaagcgaagaacccaccgaaaacagcacaggaaacacagaagaagagaaaaag

SEQ ID NO: 237638 - RNA, 65 nt, Homo sapiens
gcgggccgggaagaagcgccgcgcacggaccggcagagggcagccaagcaggaccacccaccagc

SEQ ID NO: 237639 - RNA, 64 nt, Homo sapiens
aaagcgagcgacgagcgagcgcgcgcgcgaaaacccgggcagaagccaggaaaaagcccaggag

SEQ ID NO: 237640 - RNA, 84 nt, Homo sapiens
cgagagcgcgaaggaaacggccgccgccgccgcgagcgccccggagaaaccagagagcaagacaaagaaacagaagcgcgagaa

SEQ ID NO: 237641 - RNA, 76 nt, Homo sapiens
agaacaaaaagggccaggcaccgggaaaacgcagaggaacgagggggagccacgaggagaaggccacgcgggcgcc

SEQ ID NO: 237642 - RNA, 84 nt, Homo sapiens
gaggggcccgccaccacgcacgggcgcacggaggacgggaaaaccagcagcagagggacggaaacagacgacgacacggacagg

SEQ ID NO: 237643 - RNA, 57 nt, Homo sapiens
acaacacaccaggcgagagcaggggagaaggaaacaggccaggaggcagggaggaag

SEQ ID NO: 237644 - RNA, 52 nt, Homo sapiens
agggccggacccacggaccccggagaaaagcaaacgccagcagaccacaccc

SEQ ID NO: 237645 - RNA, 103 nt, Homo sapiens
gcgacggccccagcccacagcagcagcagcggcgccgcccgcagcccacagcccggccagggaggcagacaggccaaccagcgagcggagagcggcccggcgc

SEQ ID NO: 237646 - RNA, 75 nt, Homo sapiens
ccccagcacacgggccaagaccaaccagcgggccaagggaaaggagcggacgcggcccacgcacgaacccgccgc

SEQ ID NO: 237647 - RNA, 47 nt, Homo sapiens
cggaggacgagaggggacgccagaggggaagcaaggccaagccacag

SEQ ID NO: 237648 - RNA, 70 nt, Homo sapiens
aaggaccaagaaccaggacagagacaagaggacaaacccaaaagcgggagccgccaaggagaggagcgca

SEQ ID NO: 237649 - RNA, 79 nt, Homo sapiens
gcaacaagacagagcggccggagccgcggcggccgcggagagaagcaacaggaaaaaagagacagcaagggagaaacgg

SEQ ID NO: 237650 - RNA, 73 nt, Homo sapiens
agccggcccccaaccaaggcaggagggaacccggcgcaaccgcacccacgaagacacaaagagaagagagcaa

SEQ ID NO: 237651 - RNA, 75 nt, Homo sapiens
cgcccaggacaaacccagaccacacaagggcaggggggaaagcagggagaaggagccacagagggcagagacagg

SEQ ID NO: 237652 - RNA, 72 nt, Homo sapiens
gcggcgcccaagacagcaagggacagacgggaaaaaagagcaccaggggcagcggcaagcaggggagccagc

SEQ ID NO: 237653 - RNA, 81 nt, Homo sapiens
gcgcggaggagggaaggcggccggggccgggacgccagccaggaggacccccggggaaaggagcacaaagacaggggcgga

SEQ ID NO: 237654 - RNA, 74 nt, Homo sapiens
gaaagcccccacggaaggccacgagggcggaccccgacgggcgaaccagcgggaggaggcaaagccacgccgga

SEQ ID NO: 237655 - RNA, 72 nt, Homo sapiens
gcaacggcaaccgaaagggcaagccacaagagcccggagcgcaaaggcagggaggagccccgcagaaccgcc

SEQ ID NO: 237656 - RNA, 90 nt, Homo sapiens
cggaggcacacacaagaccgcacgacaggcacaggagaacccagacacggagaaccagcaaccagaaacacagcgaaagcaggccaacga

SEQ ID NO: 237657 - RNA, 75 nt, Homo sapiens
cgaagagccccccccccaacaccgcgacacgcaggggcgggaggaacagagcgacaggcaaacacccaggggaag

SEQ ID NO: 237658 - RNA, 52 nt, Homo sapiens
ggagcgccggcggcgcccggaaggcgcgcccaaaagcagacggagaacagga

SEQ ID NO: 237659 - RNA, 73 nt, Homo sapiens
ccaagaaacaacacgcgagcacagcgaaaaaaaccccgaagaagagagcagggcagagaggcagaaccagaag

SEQ ID NO: 237660 - RNA, 66 nt, Homo sapiens
ggagagaagaagaagaaaccggagaaggaacagaccccggaggagggccggaaagagggcgggccc

SEQ ID NO: 237661 - RNA, 62 nt, Homo sapiens
ggcaagggggcacccagcggcacaaaaaggacgccggcaaccaaaagaaagcggggacgcac

SEQ ID NO: 237662 - RNA, 76 nt, Homo sapiens
aggagaaggacgacggccgcagagaggaaagcgagccagggcgccccaggaaacagaacgacagcccgcaccgacg

SEQ ID NO: 237663 - RNA, 37 nt, Homo sapiens
cagagggagcgcaggggaagcggcccagccgacgcgg

SEQ ID NO: 237664 - RNA, 63 nt, Homo sapiens
gcaggaacaggcagaggagacaccgcgccacaaagccaggagccggcggcacacccaggacag

SEQ ID NO: 237665 - RNA, 67 nt, Homo sapiens
cgcgcgacgcccagagccgcggccggggcgcgggaggggaggacgcgagcggaagagaagcaaaaag

SEQ ID NO: 237666 - RNA, 98 nt, Homo sapiens
aaaccggaacccggcagcagccaagggccaggaagcagagagaacagagggacggaaacagacgacgacacggacaggacggcggacagggcgacgaa

SEQ ID NO: 237667 - RNA, 77 nt, Homo sapiens
ccagcaagagcggaggcgcccggcggagcagaggaaccacacgcgacagaaaggaaggaggagaaggaagccacgac

SEQ ID NO: 237668 - RNA, 69 nt, Homo sapiens
ggaagagaaggagcggagcgccaagcccggccaaaaagcgcgcagcccagagaggacgacaggagcaca

SEQ ID NO: 237669 - RNA, 61 nt, Homo sapiens
gaaagacaggagaccaaaaaggcagcgcacagcccagcggaggacacgccggggcagggca

SEQ ID NO: 237670 - RNA, 96 nt, Homo sapiens
ggccccggacgaagagagggagaaagaagcccaagacaagaccaaaagggaccgcgcaagaaacgccggagggaaaaaagcgaaaacaggacggaa

SEQ ID NO: 237671 - RNA, 80 nt, Homo sapiens
ggggccggccagccacccaaggccccggacgccggagaggcaccggaccggcgggagccccgcagcacagcccggcccgg

SEQ ID NO: 237672 - RNA, 80 nt, Homo sapiens
caggaaaggagggcaccaaccacaaagccacacgcacagacgccgggaccggaaagcagcaagcccgagaaaccaccagc

SEQ ID NO: 237673 - RNA, 81 nt, Homo sapiens
caagcagacaaaccaaggcggccgggagaggagggacagcagcgggagaacaccccacggagacaggacgccacgacagaa

SEQ ID NO: 237674 - RNA, 70 nt, Homo sapiens
gcaaccaccagcagcccccagagcggaacacaggcaagccacagccaggaaacaccagccccccggcacg

SEQ ID NO: 237675 - RNA, 84 nt, Homo sapiens
cggacaccggaagcgggaaaggcaccgacacgcggggccacgagaggggacccgcggcccaggcgccggcgaacaaccccggcc

SEQ ID NO: 237676 - RNA, 72 nt, Homo sapiens
aacaggcaggaaagaaaagcaagcccaggaagcacgaagcaacggaaggacagccgacccccaggcaagagg

SEQ ID NO: 237677 - RNA, 74 nt, Homo sapiens
cccagcccgggcccccaacgagaccaagccacccggagaacaagaaaaagagaaaagaaagaagcagaaaggac

SEQ ID NO: 237678 - RNA, 73 nt, Homo sapiens
gccgccgccagaggagagcaccggccacggaaaagcaaaggaggcagcacggcaggagacgaggagaggacag

SEQ ID NO: 237679 - RNA, 72 nt, Homo sapiens
ccggggcacccggccgcccaaccagccccgccgacccacgagcccggcgacagcccagggagccccagacgc

SEQ ID NO: 237680 - RNA, 71 nt, Homo sapiens
aaggcacgaccccaaaggaagccagcaaggagggcgaaagaggcacccaaaacacgggggaggcagaaaac

SEQ ID NO: 237681 - RNA, 86 nt, Homo sapiens
gggaaggaggccgagccgggaccaggcccgggggcggcggccacgccaaggacgggaccacggccgagccgggacaagccgccgcg

SEQ ID NO: 237682 - RNA, 79 nt, Homo sapiens
aaacaagaccgcaaaggagcaggaaaagggggccagacacacaaaaagaaagacgcgagcaacaaagccagagggagac

SEQ ID NO: 237683 - RNA, 84 nt, Homo sapiens
cggggagccccgcgccacaggagaacaccaacaccagcagcagaggcccccagacccgagccagcagaaccaccccaccagaac

SEQ ID NO: 237684 - RNA, 75 nt, Homo sapiens
ccgacgaggacggaggacggagaggaccgcaccagcacgcccacccagagaccagagggggacaccaagagcgac

SEQ ID NO: 237685 - RNA, 77 nt, Homo sapiens
aaacaagcacgccgcaacgaagacagccggagagacacagcacagcaacgccgcggaaaacgccgccgagccggaga

SEQ ID NO: 237686 - RNA, 61 nt, Homo sapiens
ccggggcggcggacggccgcgggcagccacaagggcgcagaagccggcagagcccaagaga

SEQ ID NO: 237687 - RNA, 53 nt, Homo sapiens
cagcccgcagcacgaccagcaggaacggggagagcccagggacgcggagggag

SEQ ID NO: 237688 - RNA, 70 nt, Homo sapiens
aacaagaagcaacaaggcaagaaaaaggaaccgaagaacaaaggaaagagcacaacagcggccccacaag

SEQ ID NO: 237689 - RNA, 100 nt, Homo sapiens
cgcagccccacggcgcgacgcgaggcggacgcacgggcccggaaaggaggacaggagagacaacggaggcaagaaagacggagaagcgagaagagaccag

SEQ ID NO: 237690 - RNA, 54 nt, Homo sapiens
gcggggcgcgcggcgccggcggcgcgcggcccccgcgcagacgcagggcaccaa

SEQ ID NO: 237691 - RNA, 63 nt, Homo sapiens
gacaaagcacagaagaggcacagcgcggggcacaagcgggccagaagcacacccgcccggcgc

SEQ ID NO: 237692 - RNA, 66 nt, Homo sapiens
cagccccacgaagcagccagagcccggcaccacccacgagacggaacccagaaaaccaaagacccc

SEQ ID NO: 237693 - RNA, 61 nt, Homo sapiens
cagcagccccacagaccaggcagccagcggaggccgccgggcgcaaaccagagaccgaagg

SEQ ID NO: 237694 - RNA, 52 nt, Homo sapiens
gcaaaccagacaaaaggaccagacaaccaaaaaggagcacaacaggcagaca

SEQ ID NO: 237695 - RNA, 73 nt, Homo sapiens
ggagacgaaggaaagaaaaagcggaaaggaacagcacagggacagggcaaggaagaaggagacagccaggacc

SEQ ID NO: 237696 - RNA, 71 nt, Homo sapiens
gagcaggcgccgccccagcccgcgaacggcacacagagaaaaaaagggaacaaaacacagcaagcagacaa

SEQ ID NO: 237697 - RNA, 67 nt, Homo sapiens
cacagggggggcggcggggcgggaggaacgggggagcccacaggagccagagagacggggcgccagg

SEQ ID NO: 237698 - RNA, 48 nt, Homo sapiens
caaggccgcgccaggaagggaaggagcaagagaagcaggaaacggggg

SEQ ID NO: 237699 - RNA, 74 nt, Homo sapiens
accagaacaagacgaaagcagaccaacaagaaggacccggaaccggccagagacacccccagggcggcgggccg

SEQ ID NO: 237700 - RNA, 79 nt, Homo sapiens
cccagccgaccgagcccaggagcgccacgcgcggaaggcagcgcccagcagcgcagagccccagcccccagcagccgac

SEQ ID NO: 237701 - RNA, 66 nt, Homo sapiens
cgcccccccacccagggaaaacgggcacgcggaccacccacccaaagagcaccgacacccacacgc

SEQ ID NO: 237702 - RNA, 85 nt, Homo sapiens
cgacagccagacgcaaggcgaggaggaagaacaggaaagccaggccagaagaaggaaggccggggaggggacaggaaagacacac

SEQ ID NO: 237703 - RNA, 109 nt, Homo sapiens
gagcgaggcaagaaaaacagagacaaaaaacaaagagcggagcccaaagccacgaagccagggaaccaacccaagcaaggaaaccaacccggaaggccagaaaggcagc

SEQ ID NO: 237704 - RNA, 67 nt, Homo sapiens
gaaaacggaaaacccgaaaaggagaaccaagaagagggccgcacagcccacagagagaaaggcagcc

SEQ ID NO: 237705 - RNA, 60 nt, Homo sapiens
ccaacaaggagagcgaagagacaacacacaacagaagacaagagccaggccaagcagcag

SEQ ID NO: 237706 - RNA, 75 nt, Homo sapiens
agccacgagccagcgaggagaacagccgaaaggcggggacgggccggcccgcggaaggaccagccgcccggagaa

SEQ ID NO: 237707 - RNA, 74 nt, Homo sapiens
acacggccgcaaagaggagcaagaaagaaaaagaggaagaggcaccagacccccggcggccaagacacagcgaa

SEQ ID NO: 237708 - RNA, 75 nt, Homo sapiens
ggaagagaggcaagaagggcgcagaccaaaacccagccccagcacggaggagaggggcgaaccacagaggagccg

SEQ ID NO: 237709 - RNA, 58 nt, Homo sapiens
ggcgccacacaaggagaaagaggacacggccgacagacagcgggccggggcaggggag

SEQ ID NO: 237710 - RNA, 61 nt, Homo sapiens
agccgcagccaagcccggaagacgcgaccgggcaccggcgggaaaaaggaagcccaccacc

SEQ ID NO: 237711 - RNA, 72 nt, Homo sapiens
aggaacaacaagcaggcaggcgacggacaggacaaagaagggcacaccaccacagggaaccagcccccaaag

SEQ ID NO: 237712 - RNA, 68 nt, Homo sapiens
gaggaagagcccgccgaagacccacaggaccgcgaacaaggaggccacaaaacacccggacccaccag

SEQ ID NO: 237713 - RNA, 72 nt, Homo sapiens
aggcagcgcgaccccgcacggaccgacagcacgaggaggagagaagaaaagcggcccgagacaacaagggca

SEQ ID NO: 237714 - RNA, 79 nt, Homo sapiens
gccgcgcgcccggcggccaagcccccgaccgggaaccagaaagagacaagaagggaccggcgcgggggacccaccaccc

SEQ ID NO: 237715 - RNA, 57 nt, Homo sapiens
cggaaccgcacgggccgaggccaaacgagcagcggcaggagggagagaaaaagcagg

SEQ ID NO: 237716 - RNA, 73 nt, Homo sapiens
gggcggggccccgagcagggggggggggaagccgcagcggaaagcaggagcacagcagcaaggaggaagcagc

SEQ ID NO: 237717 - RNA, 73 nt, Homo sapiens
gaaccagaaaggagaaaccccccaacccgcaaaggacaaaaacaaagggaaggcagaacaagaagggcaacca

SEQ ID NO: 237718 - RNA, 62 nt, Homo sapiens
ccaggggcacagaagggaccacaaacgagggccaagaggacacaggaggaagacgcacgccg

SEQ ID NO: 237719 - RNA, 76 nt, Homo sapiens
gcaaaaaaacgacccgaagagaagggggacaaaggaacgagacgaaggaagggcgagacagagcacgagggcagcc

SEQ ID NO: 237720 - RNA, 74 nt, Homo sapiens
ggaggagcgaacaccgccgcggcccccgccggcgcgggacaaaccggcgaccacacacggggacgacggggaag

SEQ ID NO: 237721 - RNA, 75 nt, Homo sapiens
agaagaccacccaaaggaaggagggaggaagagacagacaccggaacaggccggagcgagggagagcaggaacac

SEQ ID NO: 237722 - RNA, 75 nt, Homo sapiens
cgaggccggagaaggcaccgcgccgaggacccgaccacagggccgagccgccgccgcgagccggccccgcaccga

SEQ ID NO: 237723 - RNA, 46 nt, Homo sapiens
ggggaccgaacaaggcaaaaggggaagaagagagggcgaaggaggc

SEQ ID NO: 237724 - RNA, 79 nt, Homo sapiens
ggaggcaggagggacgcgcagcaacagcaggaaacaggagaacgaggcacagcaagaccacaaaccaaaagaaagacga

SEQ ID NO: 237725 - RNA, 76 nt, Homo sapiens
aaacgggagacaacccccgaaggagggaaaaaccagaagagaaaaaacaaaggggagaggcaccccgcgggacgac

SEQ ID NO: 237726 - RNA, 86 nt, Homo sapiens
gggcaacccacgagagaacagagaacaggaaacccaggcccaacggcaggggagcaagaagaaagccccaaaacgacccaggacag

SEQ ID NO: 237727 - RNA, 74 nt, Homo sapiens
cgcacccgggccaggccccaagggccccagccagaagggcacccacagaggcaacgaaagcacaaaagaaaggg

SEQ ID NO: 237728 - RNA, 81 nt, Homo sapiens
acggcaaggagcccaaacagccaggaggaagaagaagcagcacagaggagacgccccagggcaccggacccacgcagccac

SEQ ID NO: 237729 - RNA, 49 nt, Homo sapiens
caagccccagccaaaaccagaaacagagccagaccagcgaaaagccaac

SEQ ID NO: 237730 - RNA, 78 nt, Homo sapiens
ggagacaggcggaacagaacaagacaacaagggagaagcccaagggcagaaaaaggcacaaagaaaacaaaagggaaa

SEQ ID NO: 237731 - RNA, 76 nt, Homo sapiens
gggaaaggagccggggaaaggcgaaagggcccgcgggaacgggcccggcccgcggccccaaaggacccgggaagcg

SEQ ID NO: 237732 - RNA, 69 nt, Homo sapiens
caggacagcaaaagaaagagacaagcggaggacaacgcagaagccaagggggagaggggaaggccgcaa

SEQ ID NO: 237733 - RNA, 46 nt, Homo sapiens
aaaaagagagcagcagcagaagcccagcccccgggccggaccacgc

SEQ ID NO: 237734 - RNA, 71 nt, Homo sapiens
ggggcccaccgcaggaacgacacccgcagccaggcaaacccacaggcaagaagcagaaggcagaacaccca

SEQ ID NO: 237735 - RNA, 78 nt, Homo sapiens
cgagacgacccgggccaggggacggccccagcaccccgacacagacagcaacgaggacgggaaccacaacaacaggac

SEQ ID NO: 237736 - RNA, 85 nt, Homo sapiens
ggcaaggagagaagagaagaacagcacaggacaggccgaagggcaagagggcacagaagacggcgccccacacacggcccacacg

SEQ ID NO: 237737 - RNA, 60 nt, Homo sapiens
ggagcgggcccgaggccaggagcgccccggagcgcagaagcagccaccaacggcaggaag

SEQ ID NO: 237738 - RNA, 74 nt, Homo sapiens
aagggcaacaagggacgggaaagaccgacccaacaagacagacgcgccccagaccaccggcagggaacagccga

SEQ ID NO: 237739 - RNA, 76 nt, Homo sapiens
gagagagaaagaccaagggggccacggagaaccagcgcagcccaacacagaggaggaggcacggccacacacgccc

SEQ ID NO: 237740 - RNA, 68 nt, Homo sapiens
gcccagcgggacaggggaggcaagcaggggggcaaaggaaagaaggcagaaagggaggccaggagcgc

SEQ ID NO: 237741 - RNA, 75 nt, Homo sapiens
cccccggcgggcccgaggcggcgagagaggcaggcggagccgaccgggccaggcaacaacaacaaaaccacgcag

SEQ ID NO: 237742 - RNA, 56 nt, Homo sapiens
agccagcaccgcacgcccgcaagggagccgccgaggcacagagaaccgaccagaac

SEQ ID NO: 237743 - RNA, 59 nt, Homo sapiens
cagacgcagggcgcccccgcggccgggcaggccggcgcagacaagcaacgcaagcaccg

SEQ ID NO: 237744 - RNA, 80 nt, Homo sapiens
gaaaaggaggcaagaaaaaggccccgacagacacgcccacgaccaggcgcgcaggcacagagcgagcaggcaacaacaca

SEQ ID NO: 237745 - RNA, 77 nt, Homo sapiens
ccaacgaggcgaacccccaccaaaaagcccagggcagcgcaagaccccgcacggaagcagcaagcacaggcagcgca

SEQ ID NO: 237746 - RNA, 63 nt, Homo sapiens
ccgaaccgcgcggccgaacccccggcgcaaggaagaagagacgccgcgcggcagacaaggccc

SEQ ID NO: 237747 - RNA, 85 nt, Homo sapiens
ccaccacgaggaaagaggcagagcagcgccaccggcaggagcaggcacaccagcaggggaggaacgcaagcggggagaacagaaa

SEQ ID NO: 237748 - RNA, 81 nt, Homo sapiens
cagccagccagagccacccggaagacccaccaccaaaaaaagccggggccggacgagaaagccgaaggagacgacggagga

SEQ ID NO: 237749 - RNA, 77 nt, Homo sapiens
cgaccgggagccggcgcgcgggcggggaggcgaggccggacgcacccggggggcccaggacgaggaggggcagcaag

SEQ ID NO: 237750 - RNA, 75 nt, Homo sapiens
ccccacagaaagggcgggaagagaaagccaaacccacccccgggcaggcagacgccggccgcacccgcccaagca

SEQ ID NO: 237751 - RNA, 75 nt, Homo sapiens
caccgccagcacgcgccgccccgcgcgcgagccacgcagcccccaggaaggagagcccggacccacccaccggcc

SEQ ID NO: 237752 - RNA, 71 nt, Homo sapiens
gacgcaggcgcacggagacccgccggcagccgccgcagaaccacaggccgaggaaacgagacagaacggcg

SEQ ID NO: 237753 - RNA, 81 nt, Homo sapiens
agcaaggcaagggaaaaccccacaaaaccagaggagccggcccaggagcagcagggaggcgggaacgcccagggagccccc

SEQ ID NO: 237754 - RNA, 79 nt, Homo sapiens
gaagaccacaaaaaagagacccacagccagcaacacccgccacgcagagccccgccaggaagacacgccggggaacgaa

SEQ ID NO: 237755 - RNA, 63 nt, Homo sapiens
cagcaccccagcgcgcagggccgccaggggcgccggagaagaggaaaacggccacaggacaaa

SEQ ID NO: 237756 - RNA, 76 nt, Homo sapiens
ccaccaccccggaggagaagaggaacacacgcccacacacggagaagagaccggcacagccgaggcaccaggccaa

SEQ ID NO: 237757 - RNA, 75 nt, Homo sapiens
ccggacgcgaggccgcgccggcacaacccacggcggcacagagccgcggcccgggagggaacaaagaggaacagg

SEQ ID NO: 237758 - RNA, 59 nt, Homo sapiens
caggggcgggcagaaggcaacgccgcaggcacaggaacagagacagacccgggggcccc

SEQ ID NO: 237759 - RNA, 53 nt, Homo sapiens
ggcaacaccccaggaggggcagccccggcgagagcacccaaccaaacaggaac

SEQ ID NO: 237760 - RNA, 75 nt, Homo sapiens
aagaggaaaagaccagggagaaagagaagcacagaagaaaacggcaccgagacaccgagacaaccaagcaagggc

SEQ ID NO: 237761 - RNA, 75 nt, Homo sapiens
ccgcccaacagaaaaagagaggagggagaacacagaaacccgccccgggaggggcagcagcaggacagggaaccc

SEQ ID NO: 237762 - RNA, 33 nt, Homo sapiens
ccgggcacacggacgaggaagcaccaaccgccc

SEQ ID NO: 237763 - RNA, 70 nt, Homo sapiens
ccacgaaggagggcaagggaaagaaagcagaaccagaccagcaccccagcacgaagccgccggagacacg

SEQ ID NO: 237764 - RNA, 74 nt, Homo sapiens
gccgggaagaggaaggacgacgccgggaaggcggcgcggggagccagaacggccgagcgaccaggagaggagcc

SEQ ID NO: 237765 - RNA, 57 nt, Homo sapiens
aggggagagcggccgccgccgcgccgcccaccacagcgagacgacgggaccgaagga

SEQ ID NO: 237766 - RNA, 79 nt, Homo sapiens
gaacccaagcagggcgaagggaacgcaaggcccccgaccacacgcccgcgcgagaaaacagggccagacgggaagaaac

SEQ ID NO: 237767 - RNA, 86 nt, Homo sapiens
agaaacacggaagccaggggaggcgaagccgagagagcgggggaaggagcagccgagccccgaggacagaaagggccgacccggag

SEQ ID NO: 237768 - RNA, 84 nt, Homo sapiens
gaacaaggaagcggagaggcaagagcgcaccaagcccgaggaaacaaagaaaaaagagcgaacggaacaggaggcaagaagcag

SEQ ID NO: 237769 - RNA, 83 nt, Homo sapiens
caccgcgcgacccggaaccgccgggccgaacagcagacgccgcggagaacacacaaccagggcccggccagaaagacaggagc

SEQ ID NO: 237770 - RNA, 77 nt, Homo sapiens
gaccggaagggaaagcgccgagagacgggccgcgccgcccgcaagcagagaggcaggaacacgcccggaagggccac

SEQ ID NO: 237771 - RNA, 83 nt, Homo sapiens
cggcgggaggcggaggcgaggggcgaggcgcggagcccgggacgcgcgacgcccgcgccccgaagaaaacgggagccgaagag

SEQ ID NO: 237772 - RNA, 71 nt, Homo sapiens
gagacccgccagcagggggagaggcaaagacaccggcagagaaccaaagggcgacagcaagaaggagccag

SEQ ID NO: 237773 - RNA, 76 nt, Homo sapiens
acgccggcgccggaagcccgggcccgccaacccggccacgcggccggcaccgaccagaacaccaggccaccagggc

SEQ ID NO: 237774 - RNA, 78 nt, Homo sapiens
gcgggcgggagcgcccaagggggcggagagcggggggggcccccagaaacccacaaagccccgaggggcagggagccc

SEQ ID NO: 237775 - RNA, 80 nt, Homo sapiens
gccccgggaccgggcgggaacccgcggggagcgggacacgaacgggaacaagcagaaagcacgaacaacgagaacaagac

SEQ ID NO: 237776 - RNA, 61 nt, Homo sapiens
ccacccccagaacacaggggaccaagaaaggcccagggaccaaagcccggacaaggcccga

SEQ ID NO: 237777 - RNA, 83 nt, Homo sapiens
caaaacggagaggcagaggccagaaacagaagccacaggcgaagaaggccaccccaggaaaacaaacaaacgaaaacaggcaa

SEQ ID NO: 237778 - RNA, 81 nt, Homo sapiens
aaaggcgggaacaagcccccacaggaagccccaagcagccgcccgcacaaccacggaaaaaagaaaaaaagaagacgccac

SEQ ID NO: 237779 - RNA, 62 nt, Homo sapiens
acagaaagagcaacagcagggcaacagagaaaagaagacagcaaacacacaaagcaaccacc

SEQ ID NO: 237780 - RNA, 69 nt, Homo sapiens
ccacgcccaagcaagcggcccgaacacagaacccaagaaggaggagaccacggggggaaggaagcgaga

SEQ ID NO: 237781 - RNA, 74 nt, Homo sapiens
gcggcaagcagcggaagaggacgacgcgacacaaacaaaaggcgcaaaggacgggcggacacagcaaggcacag

SEQ ID NO: 237782 - RNA, 74 nt, Homo sapiens
cgcggggacgcggacggggagcaccgaaagccaggaaagccacaggggaaaagaaacggcaaaaagaagcgccg

SEQ ID NO: 237783 - RNA, 92 nt, Homo sapiens
gccaagagaaaaccccgcccgcagcgacacaccaagcggaggggacgccacgcaacgccggcacgacgacggagagaggaagaagacggggc

SEQ ID NO: 237784 - RNA, 78 nt, Homo sapiens
cgcagcaacaagggcccccgacgggcgcggccgaggcaagaaccgggaaacgccaagagcgagcggacgaggagcccg

SEQ ID NO: 237785 - RNA, 86 nt, Homo sapiens
acgaaagaagcgcagcggaggaaggcgaggaaacgacacagcgggcagcggagcaggaaacgaggcagcagccccggcaaccaacg

SEQ ID NO: 237786 - RNA, 75 nt, Homo sapiens
ggagcccgcagaccgcagaaggccggagacaccagcaggaccaggaaaaccaaacaggcaacccaaggaaagccc

SEQ ID NO: 237787 - RNA, 78 nt, Homo sapiens
agggacgaggaccagacggacaacgaccacgcccaaaagagcgcaccaacccccacggaaaaaccaggaacgaggagc

SEQ ID NO: 237788 - RNA, 73 nt, Homo sapiens
agacagcggcccccagaagcacggaaaagcccccggccaaagaaccaagccgccacagggagaaaagagcaga

SEQ ID NO: 237789 - RNA, 82 nt, Homo sapiens
gcgccacccgagaaggagcgcccgccggcgggacccgccccgcccggagccccggcccccacagagggaacggaaaaagcaa

SEQ ID NO: 237790 - RNA, 79 nt, Homo sapiens
cgcccgcggccagccgcaagacccgccacaagcaacgcgggaagagaaggccacagcacagcaaagccacaacacccag

SEQ ID NO: 237791 - RNA, 70 nt, Homo sapiens
ccacacagggcagacagagaagaaggcgcgcaccggaaaagagccccggaagacgcggggaaacacaggc

SEQ ID NO: 237792 - RNA, 71 nt, Homo sapiens
ggaggggcaagaacaccgaggggccgggaacggcgccggaggaccagacccaggaggggcggaccgaggag

SEQ ID NO: 237793 - RNA, 81 nt, Homo sapiens
agaaaacgacggaccagaggcccacgaaagccagaacacaaagcggaaccggaagaaaagcaacggaaacacaagcgccaa

SEQ ID NO: 237794 - RNA, 81 nt, Homo sapiens
aggacaggacagaagacaagcaagaggagccaggaaggcagggccagcaaaagggccgggaaacgaacaaccgccaaacag

SEQ ID NO: 237795 - RNA, 78 nt, Homo sapiens
gggaaaaggcggcgcccgaagaaggcaagagcagaggccccagaccgccaagaggcacagaaaacgggaagacccacc

SEQ ID NO: 237796 - RNA, 76 nt, Homo sapiens
ggcagaggcaggcgccagacaaccaggcaagcggaagaaccgaacacacaaaggccgaggcccaccgcgcgacccc

SEQ ID NO: 237797 - RNA, 38 nt, Homo sapiens
gaccggacacgccgagcgacagcaaaggccagacgcac

SEQ ID NO: 237798 - RNA, 71 nt, Homo sapiens
acgggaggcgggaacacaagagggaagggcaccaaaacaagaaaccggccaaacagaggaccaggagaaaa

SEQ ID NO: 237799 - RNA, 80 nt, Homo sapiens
ggagcagcgccaagaccgccggacccggggcgccgcggcccggcacgcaccggcagaccaagaagcaagagagaccacga

SEQ ID NO: 237800 - RNA, 59 nt, Homo sapiens
gaccccaggaaggcacacaggcagagacaagcccccccaaggccgaggaaggcggggga

SEQ ID NO: 237801 - RNA, 78 nt, Homo sapiens
agaagaagaagcgcaaagaagcaacacaaagcggccggggcgcgggagaagaggaggaccgccagaacgcggacagcg

SEQ ID NO: 237802 - RNA, 74 nt, Homo sapiens
cccgagaagacaaagaacagccacaccagggcccacacaacgcaaggaaagaggcccaccagcgggaggagagc

SEQ ID NO: 237803 - RNA, 75 nt, Homo sapiens
ccgcgaccacggcacacgcgacaggggagggcacaggcacgaacagacagagaaaccaaacaacagggaacagcg

SEQ ID NO: 237804 - RNA, 57 nt, Homo sapiens
cacgcgcaggcgcgcgggaggcggcagcagcaggcccgacaacaagccaaaacgcac

SEQ ID NO: 237805 - RNA, 41 nt, Homo sapiens
cggcagagccaagacaggaacgcagaccagccagccccaag

SEQ ID NO: 237806 - RNA, 73 nt, Homo sapiens
acaacagaagaggagagaggaacccgaagaagaaaggacgacagccagagagagcccaaaaggcagagcgagg

SEQ ID NO: 237807 - RNA, 62 nt, Homo sapiens
cgggaggagggaaggagaaaaggaacagggagagaaggcagaaaaagacccgagcacaggcg

SEQ ID NO: 237808 - RNA, 77 nt, Homo sapiens
agaccgggaagaaacgaaggggggaggcccaggccaaaagaggcggaaacaggaggaaaaccccgaacacgaaagag

SEQ ID NO: 237809 - RNA, 42 nt, Homo sapiens
ccccgccagcgccccaccgagccggcaaccaagaggccccga

SEQ ID NO: 237810 - RNA, 53 nt, Homo sapiens
gccgcacccaaggccaaacagcagacagcagaaagagcaggacaacccacacc

SEQ ID NO: 237811 - RNA, 76 nt, Homo sapiens
aacaaaaccgcccaacccgacggggaccaccgcacggacccccccccccaagacagcgaggagccaaggacccaag

SEQ ID NO: 237812 - RNA, 76 nt, Homo sapiens
ggggcgggagagccccgcagaagacgccgacgagaaaaagaacggggacacgcgagacaccaagagaagaacgaaa

SEQ ID NO: 237813 - RNA, 38 nt, Homo sapiens
acagaaccggcccgggagcgaccaaagcagggcacccc

SEQ ID NO: 237814 - RNA, 58 nt, Homo sapiens
gcaagggacaacagaagggcccaccagccgagcagacagaagacaggggcccgccagg

SEQ ID NO: 237815 - RNA, 77 nt, Homo sapiens
gccagcgagggcgcaccgggggcgggggcgccagcccaccaagaagggccgagcacagcaagcaacgggccacaccc

SEQ ID NO: 237816 - RNA, 79 nt, Homo sapiens
ccaaggaggaccggagaaaggaacagcgggacggcacgaggaggcgggagggaggcccaccacagcggagcaccggagc

SEQ ID NO: 237817 - RNA, 76 nt, Homo sapiens
acgcgcgggggagaccgggcccggcccccccggagcaagccacagccaggaaacaccagccccccggcacggccaa

SEQ ID NO: 237818 - RNA, 83 nt, Homo sapiens
ggaccccgacagcagaacccagggccccagcccaaccagagcgaccaggcagagacaagagaagaggagacaggcagcagaag

SEQ ID NO: 237819 - RNA, 64 nt, Homo sapiens
gaaggaccaagaaccaggcggcagcgcgggcagcgacaggagacgagacaagagccgaaaaaca

SEQ ID NO: 237820 - RNA, 64 nt, Homo sapiens
cggcacagagaagagcccagagaagagcggaagcaagagagggccacacaccacagcaaccaag

SEQ ID NO: 237821 - RNA, 72 nt, Homo sapiens
ggacgccggagaacggcccaaccgccggacgcagcgaaggccaaggggcccaccccgcaccccgcaccccaa

SEQ ID NO: 237822 - RNA, 83 nt, Homo sapiens
caaagcaacacagcgaggccggcggcagggaggaccaagaacgcccagcccgcgggcaccggcagaaaggaggaggaaaacac

SEQ ID NO: 237823 - RNA, 37 nt, Homo sapiens
cgcacagccccgcgcccgagccggcacaaaccgagcc

SEQ ID NO: 237824 - RNA, 55 nt, Homo sapiens
acacccaggggcaaagaacgggaaagaaggacacccaaaccaaaagagaagcaac

SEQ ID NO: 237825 - RNA, 81 nt, Homo sapiens
agagcaaagacagcaaaaaaaaggaagcacaccagagccacagcacagggacgagagcgaaaccacacaacgcccacccgc

SEQ ID NO: 237826 - RNA, 61 nt, Homo sapiens
acagggggaagccaagcagaacaaacagagagagcaaaacgacgaaggagccaagaggacc

SEQ ID NO: 237827 - RNA, 75 nt, Homo sapiens
ccacccccgggacgcgcccacggcgccccggcgcgacagccagcaggggcagaagcagcagacggaacgagggca

SEQ ID NO: 237828 - RNA, 37 nt, Homo sapiens
gcagaaaccaaaaaagcaggaaaaccaaggagaggac

SEQ ID NO: 237829 - RNA, 80 nt, Homo sapiens
gcggagacacaggcaaacgcagaaaagagagccgggcgcggaaacgaggaaaagacagacggggaaaaaaaacgaagaca

SEQ ID NO: 237830 - RNA, 52 nt, Homo sapiens
cgcgcgccaaagcgcgccgccccgggcaaaaggccaccggccacgcaaagag

SEQ ID NO: 237831 - RNA, 87 nt, Homo sapiens
gaccgcagccaggccgacccgaccggaccagacaaggaccgaaggagaagaaggagaaggggaggagaaggcaagccggaaagagcg

SEQ ID NO: 237832 - RNA, 71 nt, Homo sapiens
gacagcaacaagaaagaaacgggcacaccaacgaggaacagggccggaagaaagaagaacgccaagcaagg

SEQ ID NO: 237833 - RNA, 61 nt, Homo sapiens
ccgaaaagcgagcgcgaggaaaaggcggcgggagccccacgacggcaggcgcacggaacag

SEQ ID NO: 237834 - RNA, 83 nt, Homo sapiens
cgaacgcggggcgcaccgggagaggcgggcaccgggacgccggaaagggccccggcacagggcaacgacacaaaaagagacaa

SEQ ID NO: 237835 - RNA, 69 nt, Homo sapiens
cccccgaccacacaccagaaccggaggaggaccgcggagggaacaccggccaaaaaaggaaagaaaaaa

SEQ ID NO: 237836 - RNA, 57 nt, Homo sapiens
cggcgcgggagagcgcgccagccggccgcgaacacgaagcccgggcaagacaacaaa

SEQ ID NO: 237837 - RNA, 73 nt, Homo sapiens
accaaaacaggagcagaacggaccagaccacggagagcacaaagggaagagcgggcggggcgcacacagccag

SEQ ID NO: 237838 - RNA, 66 nt, Homo sapiens
ggaagacagagggaggaggaaacgcagcagaggcagaacggaagggacacagaagagccagaggcc

SEQ ID NO: 237839 - RNA, 76 nt, Homo sapiens
ggcgcggagcaacagcccccacacgcaccagagccagggcgcaggagcagcagcacagggacggaaaaggcgcaca

SEQ ID NO: 237840 - RNA, 35 nt, Homo sapiens
gcaggaaccaccaggacagaaccggaccaaaccag

SEQ ID NO: 237841 - RNA, 77 nt, Homo sapiens
gcaaccggcagccccacccaccggcccacccacaagcgcacaggaccggggaagaaaccccggagccagcaaaaaca

SEQ ID NO: 237842 - RNA, 73 nt, Homo sapiens
caaccgagaaaaaagggaggagcgcacgacgggaacccacgagggggaggaggaagagaagcgcgcccaagag

SEQ ID NO: 237843 - RNA, 79 nt, Homo sapiens
gcgaccgaggggagagggaacgcagcgaaagcggaacggcagaggaggaaaacgagagggcaacggcaacaaacagaag

SEQ ID NO: 237844 - RNA, 70 nt, Homo sapiens
agagccaggcaccaggacagcggcggcgggccgggcagcccggccgacaaccacggagccagaacgaccg

SEQ ID NO: 237845 - RNA, 77 nt, Homo sapiens
gccaaacaacagggaaccaaggggacaaaccaacagaagggcaaccagcaacgaagagaccagcgcgacgccaacaa

SEQ ID NO: 237846 - RNA, 59 nt, Homo sapiens
gccagcgcccagggggggaaaccaccgaagacgaccccgacgcaggccaggagccgcgg

SEQ ID NO: 237847 - RNA, 77 nt, Homo sapiens
gcccagaggggcccaccgcgcccgggagagaaggaagagagaaagaaaggaaggaagagaagggagggaagagcaga

SEQ ID NO: 237848 - RNA, 70 nt, Homo sapiens
cgggacgcagaaagggcagacacaggcacaccaagggaaggaccacgggaggcagaccccgacgacacag

SEQ ID NO: 237849 - RNA, 63 nt, Homo sapiens
ccggaaaagaccaaacaacagacacacaaggaaaaaagcagagagaacacaagccaagccgag

SEQ ID NO: 237850 - RNA, 80 nt, Homo sapiens
ggagagccagggggagaaggacggacccccaggcgccacccgggagagagaaggcccaaaagccaggggccgacggacaa

SEQ ID NO: 237851 - RNA, 58 nt, Homo sapiens
gacagcgaagacccgaaacagaggaagccccgggaacgggcaaggaggggcagcgcag

SEQ ID NO: 237852 - RNA, 77 nt, Homo sapiens
aacgaggcagaaaagagagaaacagggaagagaccagcgaaagcaggcccaacgaaccagaggaggagagaaagaaa

SEQ ID NO: 237853 - RNA, 57 nt, Homo sapiens
ggggcgggcagccgaggccgggaaccagcgaggaaggaaagaggcagaaggccagaa

SEQ ID NO: 237854 - RNA, 44 nt, Homo sapiens
gcagcggcagccgcgccaggaaacaaagccagaccgccgagggg

SEQ ID NO: 237855 - RNA, 54 nt, Homo sapiens
gggaaacaaaagagcgcgcaagaacagcacagacagggagggaagccgggcgcc

SEQ ID NO: 237856 - RNA, 78 nt, Homo sapiens
ccggggacccaagaggcgacagaccgcagaaaacacagcaagcagggacacacagggcggaaaacaccccaaaagcca

SEQ ID NO: 237857 - RNA, 80 nt, Homo sapiens
agacgacgcaccgcaggcagacaaaagggccaaagaagggagagagacgcggccggagcccccccagacacacgaggggg

SEQ ID NO: 237858 - RNA, 117 nt, Homo sapiens
aaagacgccgaacccacccaaaccaagaaaccacaacggccacagcggccggggcgagcaccaaagccaaggaagcccagaagaaagagcaccccccggaagcagcagggaaacgca

SEQ ID NO: 237859 - RNA, 70 nt, Homo sapiens
acaggcagagggaaaaaagagaggagcgaacgagacagaacaggaaaaagggagaaaaaaggagcccgaa

SEQ ID NO: 237860 - RNA, 49 nt, Homo sapiens
accccgcccggacccagcaccaacacagggaacaaagcaaagcagcggc

SEQ ID NO: 237861 - RNA, 78 nt, Homo sapiens
ccgcgcgccgacacaggacaccagacccagggaacagggcgggggaggaggaggggcaccccaaggggacgcgaaccg

SEQ ID NO: 237862 - RNA, 69 nt, Homo sapiens
cccggagagcaaggaagaaagcagcccagcagacaaaacggacccaaaaaagccaagccaagaagcccc

SEQ ID NO: 237863 - RNA, 79 nt, Homo sapiens
ggaggagccagaggcaacaaggcggacaagagaagccgccagccacgaggcccccggggcgccacacgagagccaggcc

SEQ ID NO: 237864 - RNA, 43 nt, Homo sapiens
gggagacgacacgccaggaggggcccgggcagagggaaagcag

SEQ ID NO: 237865 - RNA, 99 nt, Homo sapiens
ggcgcacacagggagaacagagggccacacagcgccaacagcgaacgcaccgaaaccccccccgcggcccgccaggcgacccacggacagacgcgcgcg

SEQ ID NO: 237866 - RNA, 75 nt, Homo sapiens
caagacacgaaagaaagccgacagcaaggcaccacacccagaccaccaaaacaaagggccaggaagaaagccaca

SEQ ID NO: 237867 - RNA, 75 nt, Homo sapiens
gcaaaccacgaaaccaggggacgcaccaacacgcacaaaaagggcacaccagcagaccgggcggggggcgcgccg

SEQ ID NO: 237868 - RNA, 42 nt, Homo sapiens
agcaccggaaggggaccgaggggggccccagcccggccgaac

SEQ ID NO: 237869 - RNA, 46 nt, Homo sapiens
cagccggaagaagggacaagggcagaagcgggagcggggaggggga

SEQ ID NO: 237870 - RNA, 65 nt, Homo sapiens
acagaacagccaccaaaacagaagaccagaaggaaaacacaccaggcacagaaaggccccccgcc

SEQ ID NO: 237871 - RNA, 97 nt, Homo sapiens
agcacaggcacccacgcggggaaagcgggagccgagaccaaagagaaagggcccgcacccagaaaacaagggaggaaaggacgcgacagaagaagga

SEQ ID NO: 237872 - RNA, 71 nt, Homo sapiens
gaaggaccaagaaccagaaccgcacggccaagcccacacagaggaaaccgggagagagacagaaggcgaaa

SEQ ID NO: 237873 - RNA, 79 nt, Homo sapiens
cgcaccacaagggacgagaccaaacggaagaggccagccccgagagcgcagacaggggggccaagccagagccagaccg

SEQ ID NO: 237874 - RNA, 76 nt, Homo sapiens
aaacagcccaacaggaaaaggaagcaaaggaccaaagagcgggacaggacggacgcggacccagaacccccagacc

SEQ ID NO: 237875 - RNA, 76 nt, Homo sapiens
acccaacaaccggcaaggagaggcgaaaggagagaagagaccaagagaagggacaacaaacccggagcccaaaagg

SEQ ID NO: 237876 - RNA, 79 nt, Homo sapiens
acaaccacgaccacaaaccggcggagccacagggcggagaacggaaaagcaccaggaagcagagaggaccgcagaaggg

SEQ ID NO: 237877 - RNA, 55 nt, Homo sapiens
cacacgcagaacgggcggacgggcgcccagccagcccgaccccgaggaaccagcg

SEQ ID NO: 237878 - RNA, 106 nt, Homo sapiens
caggggacaccagcccccaaggagcccacagcgcgacgcaccgcgggggaccaagggaaacaaggcccccacgccggccagcggccccaaacccggccggggggac

SEQ ID NO: 237879 - RNA, 102 nt, Homo sapiens
aggaggagcggagccgaagccggagggccacccgacgcagagggcaggccccagccagggagagaaggcgcgcaggagagcgcagagacccgcccggaagcg

SEQ ID NO: 237880 - RNA, 63 nt, Homo sapiens
cagaagaggggagcgcaccacgagagcgcggcagcccgggacgggaagggacgccaggaggcg

SEQ ID NO: 237881 - RNA, 59 nt, Homo sapiens
aggagagaacgcgagggaaggcccgcagcccccggaagccaaagacccccagggacccg

SEQ ID NO: 237882 - RNA, 81 nt, Homo sapiens
ccaccgccagcggaacccggggacacgacgccccaaaccgccaggagaaaaaagacaagcagaccggaagaccgacggaag

SEQ ID NO: 237883 - RNA, 87 nt, Homo sapiens
cggaaccgggaggcgacgcacacgagcggaggcgaaggacggcgcccagcgaggggccggcacccgcccgagcagcgccagggccgc

SEQ ID NO: 237884 - RNA, 86 nt, Homo sapiens
gacaaacggcgggcccgggaagcgggccggcagcgcccggacgaggaggccggacacccaacagcacgcagacaaggcaccaacag

SEQ ID NO: 237885 - RNA, 75 nt, Homo sapiens
caagggaaagcgcggaagccaacggaacgccagggaaaagggggacaggagaacgacaccagagaggaccacaga

SEQ ID NO: 237886 - RNA, 65 nt, Homo sapiens
cgcaccacacaacagcagccaggagaacacccagcagaggcgcaggaaaagcaccgaaagaacac

SEQ ID NO: 237887 - RNA, 62 nt, Homo sapiens
caagaaaaagcaaggagaggaggagcacaacggagacaaagaaacccgcgccagagagccaa

SEQ ID NO: 237888 - RNA, 65 nt, Homo sapiens
accgcaacggcggacaccagcgagcgcgccccggaggccaggccaggcagagcagcccaccaggg

SEQ ID NO: 237889 - RNA, 53 nt, Homo sapiens
gccgggcaaaacccggaaaaaagcaccccaacaaccaggccggaaaggaaaaa

SEQ ID NO: 237890 - RNA, 70 nt, Homo sapiens
aggagcgcaccggcacaacggcaaagaagcaaaaaccagcagcaaggaggaacaggagcgggagggaggc

SEQ ID NO: 237891 - RNA, 67 nt, Homo sapiens
ggacgaagaggaacgcccgggaaacaaacacgagaacggggagacagccaaggaaacggaagaccca

SEQ ID NO: 237892 - RNA, 79 nt, Homo sapiens
aggaccaagaaccagcgccagcagcccgggggcgacgacgaggaccaggagccaggggcgggggaacgaggagaagccg

SEQ ID NO: 237893 - RNA, 73 nt, Homo sapiens
gccagcaagggacacaccccagagacccgcccgaccaggagaaccggcagacgaggaccgcagggagcaccag

SEQ ID NO: 237894 - RNA, 71 nt, Homo sapiens
gaaagggccacacaccggagagacaaaaaagcagcccccagccaaggcggcagacgcagacaaacaaaaca

SEQ ID NO: 237895 - RNA, 111 nt, Homo sapiens
gcgagcgacgccaccagagcagggcaggagccaggaccaggaaggaagaccccccaagacaccgccagggcacagcaaaccaaacagcccagcagcccagcagcccagcca

SEQ ID NO: 237896 - RNA, 69 nt, Homo sapiens
agcccccaagagcggggacaggccgccaggagacagaccgacagcaacaagaaagaaacgggcacacca

SEQ ID NO: 237897 - RNA, 75 nt, Homo sapiens
cggggcggaccaccgcccccgcgccccgcaccgcggcaaagagaggacgcagcgagaaagacaagcagaccggaa

SEQ ID NO: 237898 - RNA, 58 nt, Homo sapiens
gccagccggggcggccggccaggaaccacccgaagggaggaggaggagagaggaccaa

SEQ ID NO: 237899 - RNA, 74 nt, Homo sapiens
aagagcacaagagcccaccggccaccccccacaaggcaagcccgaggcaccaccccagaaccgcagagcaacaa

SEQ ID NO: 237900 - RNA, 64 nt, Homo sapiens
cagaccagccccaggggaacaggccaaagccacccccaaaggcagaggaagaacgagcagggaa

SEQ ID NO: 237901 - RNA, 74 nt, Homo sapiens
ccgcggccgccggacggccgggcgcggaggcagacccgcagaccaacgaaaaccacggcgccacgaagagggaa

SEQ ID NO: 237902 - RNA, 68 nt, Homo sapiens
agcccaaccagaaaagagcaagcaagcaagaacgagagcagcagagaaggaagcacaaacaccagccc

SEQ ID NO: 237903 - RNA, 71 nt, Homo sapiens
aaacaaagggaaggagaaagaaccaacgggacccaacagacaacgaagagaggaaagaagcggaaaggagg

SEQ ID NO: 237904 - RNA, 61 nt, Homo sapiens
ggacgcgagagccgccgcggggccgcccagaggcggaggagaaccaccaaggaccgagagc

SEQ ID NO: 237905 - RNA, 108 nt, Homo sapiens
acagagaagaggaccagcgagaacaagaagcccacagaacagacagcaaagcccggcccacacgcagcccggccagcccaacagcgcgcaaccccggacacagcgcac

SEQ ID NO: 237906 - RNA, 116 nt, Homo sapiens
gacgacccgcgcagacacggaccgcgggccagccgccaaagaccccgccggagggcggaaaacaccccaaaagccaaaagggaaaggaaaagaccaacaacagcgcaggacacgag

SEQ ID NO: 237907 - RNA, 79 nt, Homo sapiens
ggacggagccccggcgagccgcggggaagcacacccccccgaaggggccaacgagcccgcagcccacgcagggcagccc

SEQ ID NO: 237908 - RNA, 90 nt, Homo sapiens
aggccccgccacacagaccacgggccacggaaggaaacccagggcgggaagcggggaaaggaaaacaccagcacaccaaagaccggggcc

SEQ ID NO: 237909 - RNA, 72 nt, Homo sapiens
gggaggaccaggagcgccccaagagagaagaaaccagaggccacaggaggaggcccgaagaggcagaagaca

SEQ ID NO: 237910 - RNA, 67 nt, Homo sapiens
cgcccgcccacccagggccggaaaagccaacgccggcgaagaggaacagggagggcccccgccagcc

SEQ ID NO: 237911 - RNA, 34 nt, Homo sapiens
cgcagccccgacaaggggaaagagaagaaggagg

SEQ ID NO: 237912 - RNA, 76 nt, Homo sapiens
ccgcggggcagcgccacgaacaccagaccaccacccagcaggacaggcccggcccccgagccgaggacggcacggg

SEQ ID NO: 237913 - RNA, 58 nt, Homo sapiens
ggagaagagaacggccacagcagccagcgcacagggaaagaccaccccagaacaggcc

SEQ ID NO: 237914 - RNA, 56 nt, Homo sapiens
gcgggagcgcccaagggggcggagagcggggggggacaaaacagaggagaccagac

SEQ ID NO: 237915 - RNA, 87 nt, Homo sapiens
gcaagagcgcggcgagggccacgcgcgggcgagaaggggcccacgaggaggagggggggcacgagaagccgccgagagacccgcccc

SEQ ID NO: 237916 - RNA, 71 nt, Homo sapiens
ccgaccgcaacagaacggacccggcacaacccgaaggaccagaccccaccaaagacccgccgacaccaaac

SEQ ID NO: 237917 - RNA, 75 nt, Homo sapiens
gacagcggccgggaacccagggccacgaggggccaaggcgaccacaaagcgaagaaaaggaggaggccccgaaac

SEQ ID NO: 237918 - RNA, 76 nt, Homo sapiens
accgaccgcaacagaacggacccgggcagaaacccaaccaagagaaccagaagcggacgcaggagagaagaaaaac

SEQ ID NO: 237919 - RNA, 56 nt, Homo sapiens
caacccccaccagccccgagagcaaggacacaggacacacagcaacgaagcagggg

SEQ ID NO: 237920 - RNA, 81 nt, Homo sapiens
cgcggagacagacaagacaagaccggcggggaagcggaaacacacacggaagaggggaaagggaacagaacgaaggcccgg

SEQ ID NO: 237921 - RNA, 84 nt, Homo sapiens
aacaagaaggggagcagaagcagggcagacaagacccggagggcgagccggcaccagggcccaggacagaaagagaaacgcaga

SEQ ID NO: 237922 - RNA, 77 nt, Homo sapiens
acgagaaaaccagcaagaccaagcagcaccgagagccagcaagcaggccaagcgcaagaccacagaagaacaggcga

SEQ ID NO: 237923 - RNA, 46 nt, Homo sapiens
ccaggggccccagagcccgcgcgccaagacaaggggcgcagagcgg

SEQ ID NO: 237924 - RNA, 81 nt, Homo sapiens
gagccccaagcgggacagaagggagggcaagcagaaagcagaggaaaacgaacaacacccaaagccaaagaagaaacagcg

SEQ ID NO: 237925 - RNA, 55 nt, Homo sapiens
cggaggcggcgcagcagcaccgacgcccaaggaggagagaacgggcccccaccgg

SEQ ID NO: 237926 - RNA, 63 nt, Homo sapiens
cgcagccgagcggggccggccacaggagacgccgcacccaggcggaggcagggggaccggcgc

SEQ ID NO: 237927 - RNA, 87 nt, Homo sapiens
cagggagcagcgagcacgcgcccgcaacccgaaccacggacaggacccgcccagcccaacggggagggggggcccacccgcgggggc

SEQ ID NO: 237928 - RNA, 87 nt, Homo sapiens
cgccgagggacaccgcagagaggcagagcaggcccgcccagcccagcccccagagagcagaccccagggcggccccgggggggcgag

SEQ ID NO: 237929 - RNA, 68 nt, Homo sapiens
gggccggcggggggaggagagccaacggaccacaacagagaaccaaggacgggaagcagaaaaaagaa

SEQ ID NO: 237930 - RNA, 54 nt, Homo sapiens
aaaaaacacgggcggacggaacggcccgccaagcgcccccgggcacgagagcgg

SEQ ID NO: 237931 - RNA, 73 nt, Homo sapiens
agagaaagagaacaccggagggaaaagaacggagcccaccgcaggacaccgggggggaaccacaaagaacgga

SEQ ID NO: 237932 - RNA, 67 nt, Homo sapiens
gcacggggcaaagcacccacacagcagggagaaaacgggccggaggaaaagggcggcaggggaccac

SEQ ID NO: 237933 - RNA, 72 nt, Homo sapiens
ggccgcagacgcgaaggaacggcaaagcaagagcggaacaagaagaaacccagaccaggcccaagagaaagg

SEQ ID NO: 237934 - RNA, 72 nt, Homo sapiens
gaacacaaccaacggcgaacccaaccaaaggaaaaccccaaaaaaacagacggccggacacccaacagcacg

SEQ ID NO: 237935 - RNA, 59 nt, Homo sapiens
ggggaccgcggaagggaaggaaaaaccgagggaaccaccgggcccgaggacacagggcc

SEQ ID NO: 237936 - RNA, 73 nt, Homo sapiens
cagcgcggacccggagcgacaagcgccccgacggagcgccaggacgagccaggacaaaaccaggcagaaccaa

SEQ ID NO: 237937 - RNA, 78 nt, Homo sapiens
cagcggaagacgcagagggagacagaaaaccaagccaggagggaacgcaacacaacccgcacacgccaccccaaggcc

SEQ ID NO: 237938 - RNA, 86 nt, Homo sapiens
acagcaggagcaggggcgcagcgcggccgcggagacagggagacccggggcggaaccagcaaaacccagcagccagaccgccaggc

SEQ ID NO: 237939 - RNA, 78 nt, Homo sapiens
gaccaagcccagccccagccgccagcaccgaggccaaaagaaaggaagaaaacccccaaaaagccaaaaggccaagac

SEQ ID NO: 237940 - RNA, 79 nt, Homo sapiens
ggagccagacacagccacagagagagcggggcagagacaaggaaccagaacgacagcccacgcgaggaaaaaacccaaa

SEQ ID NO: 237941 - RNA, 52 nt, Homo sapiens
cgcgggggagggccggccgcagcaccccacgaccacgagccagccagccggg

SEQ ID NO: 237942 - RNA, 102 nt, Homo sapiens
aagaaacacaagacgaacgggagaacagcagcagcccacgaacagaaaggccaagccagcagacggggccagcaagcacaccaagagcaaggaaagacggca

SEQ ID NO: 237943 - RNA, 79 nt, Homo sapiens
agaaacaaacgagaaaagaagagcacagaaggagagcagaaggaagccaaccgggggagcgaaagacccgcaggcgccg

SEQ ID NO: 237944 - RNA, 71 nt, Homo sapiens
ggcggaaaaacacacgaagaaaacaggagaacagcagcccaccaacaaggaaagcgcacggcagcagcaaa

SEQ ID NO: 237945 - RNA, 85 nt, Homo sapiens
cagggcaggacaccgacaggaacagggaccacggggggcgggagaccggaaggcaaagcagaggagccaggccccggggagacag

SEQ ID NO: 237946 - RNA, 83 nt, Homo sapiens
ggggcgggaccccgccgcggcgggaggagccaggacaaaaccaggcagaaccaacacgaacccaagcacaaacaagaaaacga

SEQ ID NO: 237947 - RNA, 77 nt, Homo sapiens
aggaccaagaaccagccggcccaggccggggaagcggggcgccacggcaggagcgccccgagagcacagcagccgcc

SEQ ID NO: 237948 - RNA, 80 nt, Homo sapiens
aagccgcgagcccagcgcgcggccccgcccggcggccgggcccagggaacccagaaccgcggaccacagcaaaccaagca

SEQ ID NO: 237949 - RNA, 81 nt, Homo sapiens
cggcggcaaaaggcggcgccgaggagcgggacaacccaggagcagacagagaagcgcgcagcagagcccaaaaggcagagc

SEQ ID NO: 237950 - RNA, 91 nt, Homo sapiens
gaagacgggcgaggagaccggcaccacggcagcggcccaacgccaagaacaacgagccaggagcaggggcgcggcagaggcgcggacgagc

SEQ ID NO: 237951 - RNA, 76 nt, Homo sapiens
gacaaagagcccccacgagcccgcaaggagcagacaagggcccacaccaaagccaccagagcaagacagggacgga

SEQ ID NO: 237952 - RNA, 70 nt, Homo sapiens
aacaccacaaacccgagagcaaccagacagaccaggacccaccccgcaccagggggcgcaacacgaccag

SEQ ID NO: 237953 - RNA, 66 nt, Homo sapiens
aggcgcccacagcagcaaccggagcaggcaggcacgggacgcgggcggggcaccgggaaggagaag

SEQ ID NO: 237954 - RNA, 82 nt, Homo sapiens
agggacacagaaaccgcaagagcaagaggggccgggcaaagcacccagaaaggacgagcccccagagccagaaccccaggag

SEQ ID NO: 237955 - RNA, 77 nt, Homo sapiens
cagagagaaagaacgacgaaacggagggcccggccaggccccaccgccacaagcaggggaacaccgccaaccccaag

SEQ ID NO: 237956 - RNA, 73 nt, Homo sapiens
gcaaccaggcggcgggaccccagcaggcaagcagaagaggaacagaagaagcagagcagagacggagcagcag

SEQ ID NO: 237957 - RNA, 80 nt, Homo sapiens
gccgaaccagacgggggacaagagcccccgccgcgggcccccccgcgcgaccccaggaccagcacgcagcacgggggcag

SEQ ID NO: 237958 - RNA, 72 nt, Homo sapiens
agcagccggaaagcccagaacagcacgagccccgaccgaagcacagaacacaaagcccaggagacagcaaac

SEQ ID NO: 237959 - RNA, 71 nt, Homo sapiens
cccaccgagcgggaacgagccgggccagaaaccccaagcgcaggcccaggcacaagacggagcgccggccc

SEQ ID NO: 237960 - RNA, 76 nt, Homo sapiens
gacaccaaagaacacgacccacgcacacggcaccacgagccacaaagagaggaaaccgggccaaagcaaaggagag

SEQ ID NO: 237961 - RNA, 53 nt, Homo sapiens
agagaagaggcaaaacaaacacaaaccaaaagagcagaaggagcgagagaaca

SEQ ID NO: 237962 - RNA, 81 nt, Homo sapiens
ccaacaggcgccccagaagggcgacagggggaccgcggcgcgagggacgcaccgccccaggacggggagaaagagccccac

SEQ ID NO: 237963 - RNA, 76 nt, Homo sapiens
cgaccccacgacggcaccgcaaggcacagggcggagaacggaaaagcaccaggaagcagagaggaccgcagaaggg

SEQ ID NO: 237964 - RNA, 57 nt, Homo sapiens
ggaagaacaagcccagagcccagacccgacccaagccgcacaaaagagaagaagaag

SEQ ID NO: 237965 - RNA, 60 nt, Homo sapiens
gaagaagaacagcgaagggaccgaaaaaagaaggggcgacgcgggagaaacaaaaagaca

SEQ ID NO: 237966 - RNA, 84 nt, Homo sapiens
ccggcaacagggcggcggggaaaagagccaaaaccaggccaaccgcacgcaacgccagaaaaaaccgagaagacccaaaacgcg

SEQ ID NO: 237967 - RNA, 73 nt, Homo sapiens
cggaaaaccggcccccaacgacaaaagagggacacgaccccaggcacaagcggggaggcccaagaggaagccc

SEQ ID NO: 237968 - RNA, 79 nt, Homo sapiens
ggaaggcgcgggcaggagccggcgaggagcaccccccgccggaaagggacagagcgaagaaccccccaagaagacgaaa

SEQ ID NO: 237969 - RNA, 67 nt, Homo sapiens
cggggcagacaaacacaggggggcgaagacagcaagaaccgcaaggccaggagcgagagacggaccg

SEQ ID NO: 237970 - RNA, 91 nt, Homo sapiens
aggagcgccacgcgcggaaggcagcgcccagcagcgcagaggacaacagcagagccaggagaagcgggagcaccgaaaccacgcagaggaa

SEQ ID NO: 237971 - RNA, 72 nt, Homo sapiens
gccccccagcgcccccggggcaaacccgagccaggaaggaggagcgccgccggccacccagcgagaggagga

SEQ ID NO: 237972 - RNA, 104 nt, Homo sapiens
gaaagccaggggggccaggacgcaggggagcgcaggccgagaaaggagcgagaagagagcagagagacacagccggagccagacaagagaaagccagcacgccc

SEQ ID NO: 237973 - RNA, 78 nt, Homo sapiens
cgaagggaccaggcagacgggaagaacccagaaagaaaggagcgccccaaaaggaaacaaaagcaccgggaggaaaga

SEQ ID NO: 237974 - RNA, 85 nt, Homo sapiens
agacaaggagaaaaaaggaaaacggcgcaacacaccagaacagcaaggggcaacgccaaagaaaggaaaaccaaagagaagaaac

SEQ ID NO: 237975 - RNA, 76 nt, Homo sapiens
aaacagaaccccaaaccccaacaaggacaagaaccaacaggaagccaccagcacaagaaaagagcaagaggaaagg

SEQ ID NO: 237976 - RNA, 79 nt, Homo sapiens
agacaagacagcgcaaggcaggagaacccggaaggaaaccccagaacggagggcggacggacaaccggagcgcagggga

SEQ ID NO: 237977 - RNA, 71 nt, Homo sapiens
ggacaccaaagaaacagcacacgcgcaacaaaacccacccaacaagggaggagaagaggggaggaaccaag

SEQ ID NO: 237978 - RNA, 55 nt, Homo sapiens
gggggcgagaaggcgggaagccgaaggcagccacaggagcccaaaagaaacaggg

SEQ ID NO: 237979 - RNA, 75 nt, Homo sapiens
gaccgccggccgcagggagggcagacaggggcaaggccgaggggaacagcacacagagaggaggcggaagcacgc

SEQ ID NO: 237980 - RNA, 70 nt, Homo sapiens
ggggaaaggaaagcagcccgaaaagaaggaaacgcggcggggcagaacagaaacaaaacagcagcacaga

SEQ ID NO: 237981 - RNA, 76 nt, Homo sapiens
agggcaacacaggccaaggagaccccccgacaacagaaggggggaagcaggcaacagaaagcgggagaggagcccc

SEQ ID NO: 237982 - RNA, 75 nt, Homo sapiens
aaacgggaaaaagcacaggggaccagcagcagccgcgagagccgggcagacccgaaaagcggacgacaagggaac

SEQ ID NO: 237983 - RNA, 77 nt, Homo sapiens
cagcaccgccaggcgggcccccgcggcccgggcgagcccggagaagaggaaggccccgggaccaaggacacgcagac

SEQ ID NO: 237984 - RNA, 73 nt, Homo sapiens
gacagacaaaaaccaagaaacaaggaacaccagggagggcagagagcgagaccaccagacaaaacccccgggg

SEQ ID NO: 237985 - RNA, 96 nt, Homo sapiens
aaccaggggaagcgaagacagggggcccaaacgggagacaacccccgaaggaggggaacagagaacaacaaccaggccagaagagcaaagaacccc

SEQ ID NO: 237986 - RNA, 73 nt, Homo sapiens
ggaccgagccgacgccgcggggcagcgggccggcgccggcgcgaccgcgcacagaaagcccagacaacccagc

SEQ ID NO: 237987 - RNA, 76 nt, Homo sapiens
caggcaaacagacaaagaagagcgcgaagcagcccggaccgacaggaaagaaggagcccacaaagaaaagaacacc

SEQ ID NO: 237988 - RNA, 71 nt, Homo sapiens
gcagacgcccaacagaggaagggcgcgaaagaaaaacccggaaagagagaaaccaggaacaggacacgcac

SEQ ID NO: 237989 - RNA, 57 nt, Homo sapiens
gccagaagaacagcagaaagggaaagcagacagcgcacgaaacacacaaagaaccac

SEQ ID NO: 237990 - RNA, 63 nt, Homo sapiens
cgagaagccgaaaagcgcagcgagcggagccgccggaggagccaaggcgagcgcaacagcagg

SEQ ID NO: 237991 - RNA, 75 nt, Homo sapiens
gcacccaggcaagaccgcgcacgcacgcaaaaagaccagcccagggcagaaagcaccaacgggaacgcccaagga

SEQ ID NO: 237992 - RNA, 73 nt, Homo sapiens
acgaaggagagcgaagcaagggaccgaagaagccaaagagcaaagaaggcaaaggagcaagcaagaaggaagg

SEQ ID NO: 237993 - RNA, 34 nt, Homo sapiens
gggacgcaccacgaggcggaggcaagggcgaccg

SEQ ID NO: 237994 - RNA, 74 nt, Homo sapiens
aaccgaaaccaaaacccccagcccagaaggacacacaccaaaccggcccagcagcaggccaaggagcccaggaa

SEQ ID NO: 237995 - RNA, 57 nt, Homo sapiens
cgaagagcgccgacaaggaccgaaagaaccgcacagagcaggcccaccggcaacaca

SEQ ID NO: 237996 - RNA, 59 nt, Homo sapiens
acggaagcgcagcaacagcaagccccgggcagaggcccacgcggaccggcagcgccacc

SEQ ID NO: 237997 - RNA, 91 nt, Homo sapiens
acaaagggagcagggagaggagcgggaaacgggagggaaccagcaacaagccgcaccgccggccaggaggagagcgcaccaccaaaaaggc

SEQ ID NO: 237998 - RNA, 66 nt, Homo sapiens
gaaagcccacagagaggaccggaggcccagggaaacacccggagaacccaggcaacagagcaaccg

SEQ ID NO: 237999 - RNA, 77 nt, Homo sapiens
aggagcgcaggccagccccccagccagcaaggcaagaacgccccggcaaggacggaggcaggcaccaccaacagcgg

SEQ ID NO: 238000 - RNA, 66 nt, Homo sapiens
ggcacagagagaaggacagacgcgggaccccgcaaaaccaggagaaaagcagaagcccaggacgcc

SEQ ID NO: 238001 - RNA, 68 nt, Homo sapiens
agcccacgaacccgaagcccccaaagagagaaccggagagcacccaacacggcaaccggcacgcacca

SEQ ID NO: 238002 - RNA, 75 nt, Homo sapiens
aaggcggcccgacaccgccacccccagcaggaaagggacacagccggcaggaacggcggacgacacaacggccac

SEQ ID NO: 238003 - RNA, 76 nt, Homo sapiens
cgaggagccagcggcgggaggacaagggagggacacagggagggcgagaacccccagaagaggggaagccggaccg

SEQ ID NO: 238004 - RNA, 82 nt, Homo sapiens
ggcagcccagccgaaccgcgcgggcgaaccgaggccagcgaacagagcagagcacgcccagaaggccggaaaggagcacacc

SEQ ID NO: 238005 - RNA, 77 nt, Homo sapiens
gccaaacccgcggcagcagcaccagggagccggcccaggaggacagaccggaacacccagaagaaagcgcgccccca

SEQ ID NO: 238006 - RNA, 75 nt, Homo sapiens
ggcggagaaggagacaccggaggacgaagagggggagggaaggccagcggcgcacggacgcccgccaagcccggg

SEQ ID NO: 238007 - RNA, 82 nt, Homo sapiens
ggcccaccgagcccaggagaagccacccagcccgggaccaggagaccggcgcaaggcccgaggagaccagagagcggccagc

SEQ ID NO: 238008 - RNA, 80 nt, Homo sapiens
acaaagcagcgcccgcgccgggcccggaaagcgccgcccagcagccgcagggcaggcgccccaacccaagccagaggagg

SEQ ID NO: 238009 - RNA, 72 nt, Homo sapiens
cagggcgcagacaaggcagggccacaccaacaagacaagaaccaaacagaacccacgaagggagaccagaca

SEQ ID NO: 238010 - RNA, 75 nt, Homo sapiens
ggggaggaagcccccccggcacgacaccgccccaacccacgagaggacagcccagggagagaacagcacacagag

SEQ ID NO: 238011 - RNA, 76 nt, Homo sapiens
cgccaagaccgggaccgggcgccacgcgggggcaagacgaaggggaaaagagacgcaaaccacgaggacagagaag

SEQ ID NO: 238012 - RNA, 84 nt, Homo sapiens
aaaaggcggacgggaaggcgggagacgagaagccgaaaagcgcagcgagcggagccgccggagggcccccccaggccaagaggg

SEQ ID NO: 238013 - RNA, 75 nt, Homo sapiens
ccacacgccggcggccaagcgcgccccagaccaccggcagggaacagccgagcagaccgaggaggcccaccagca

SEQ ID NO: 238014 - RNA, 77 nt, Homo sapiens
gaaagacgggccaaaaggaagaagaagcggccccacagaggcggagcgagaagacaggcagacggagaacaggacac

SEQ ID NO: 238015 - RNA, 52 nt, Homo sapiens
cgcagcgcgcaccaaacccccggacccggcaacgacagagcgccaaggccgc

SEQ ID NO: 238016 - RNA, 80 nt, Homo sapiens
gaacgcacagcccccaccagccaccaggcagcagaaagagaaccggccagacaacaggcacaaagagagaaggaacaccc

SEQ ID NO: 238017 - RNA, 73 nt, Homo sapiens
gcacggaagaccggaagccaagagacggagcccgacggggcaaacaccacacaagcagaaaaaggcagccgag

SEQ ID NO: 238018 - RNA, 77 nt, Homo sapiens
aaacaagccggcagagcaccgaaccccagaggccaagaaagccagcagaccgaagcggcagccaaaaccgggcaccg

SEQ ID NO: 238019 - RNA, 71 nt, Homo sapiens
gaggaagcgccgccaggcccgcaggaccgccggagacagggcaagcccagagaacagcggggagcgcccgc

SEQ ID NO: 238020 - RNA, 58 nt, Homo sapiens
gcagccggccacacagagcgggagcccaggcaggggaccaaaggaccccacaaagaag

SEQ ID NO: 238021 - RNA, 63 nt, Homo sapiens
gggcgaggcggacgcgcggcgcgcaggaaaggagaagcagggcccaacaagagagggaagcag

SEQ ID NO: 238022 - RNA, 83 nt, Homo sapiens
agggaggagggaaggagagaacgagaaagacccaacaccacccgggaagggacccagggcgagggcaacgaggcgccgccgag

SEQ ID NO: 238023 - RNA, 71 nt, Homo sapiens
aaggaagagacgaagaccacggcacggggagcgcagggagaaagcgaaacaggcaagagagcgccaggcca

SEQ ID NO: 238024 - RNA, 88 nt, Homo sapiens
ccgccacgccccagacaggggaacgcggcgaccgccaagaaaggcagcgaggggagagcggaacgcaagcacaggaccagaaacgaaa

SEQ ID NO: 238025 - RNA, 72 nt, Homo sapiens
caccagcggccaagaagcaccagagcaacagcaacagccacccccaagggcggggacgaagccagaaccaaa

SEQ ID NO: 238026 - RNA, 72 nt, Homo sapiens
caccaacgggcaaaaaagccagaaagccaaggaagcagagacccgaacagcggcgcgaacgaacgagcggcc

SEQ ID NO: 238027 - RNA, 79 nt, Homo sapiens
cgggcagagaaaacaaacggacagcccagggggccgacgacgagccccgcgaggagcgcagcggagaggccagaacgcc

SEQ ID NO: 238028 - RNA, 83 nt, Homo sapiens
accgagcaacagggaagcagaggagaaccgggagccacagaaaagacaggaccaagaaagcgcccccagccgaggccgcaagc

SEQ ID NO: 238029 - RNA, 75 nt, Homo sapiens
aacagaggcgagagcggcagcagcaccagcccaagagaagaggccaaccgcaccagcaccccacgcagcaacaga

SEQ ID NO: 238030 - RNA, 82 nt, Homo sapiens
cgggaagggccacccaccgcgaggacaggccagcgagcgccgacacccaacaagaccagcccccagcagagagcggccccac

SEQ ID NO: 238031 - RNA, 52 nt, Homo sapiens
gccaagcgcgcaagaagcggccaaaccgagagaacagcgagccaagagggcg

SEQ ID NO: 238032 - RNA, 67 nt, Homo sapiens
ggaggccacccccaaagaaaagcagaagaaggaagcaagagaagaaccagccggggagccggcggaa

SEQ ID NO: 238033 - RNA, 57 nt, Homo sapiens
agccaggcgggccacaccgcaacccagcacggacgccagaaagagggcaacggccga

SEQ ID NO: 238034 - RNA, 61 nt, Homo sapiens
caggaccgacagcacaacaccgcacggggagccaagccggaaggaagcagccaccccgcca

SEQ ID NO: 238035 - RNA, 78 nt, Homo sapiens
cccggaccgagccgacgccgcggggcagcgggccggcgccggcgcgccggaagaaaacccgagcgcacgcaagaacaa

SEQ ID NO: 238036 - RNA, 87 nt, Homo sapiens
gaaaccccaccgacccacagagggagaccccacaaggaagaggacggcagccgcgcagcgcgccacagccagagccggggcccaacc

SEQ ID NO: 238037 - RNA, 79 nt, Homo sapiens
cccgcgccgggcaacgcggcgcaaccccacacacaaccaaaggaaggagaaaagacagcaaaacaaaagaaggaacggg

SEQ ID NO: 238038 - RNA, 80 nt, Homo sapiens
gaaacgggggacaaaagaaagccacaagccagagcggagaccagggaacaaaagaggccagagagaagagggggaaggga

SEQ ID NO: 238039 - RNA, 76 nt, Homo sapiens
aagggaaggccagcagcgcgcggagaagaacggggagccagaccaggggcgcagacacccgaggcacaggcacgcc

SEQ ID NO: 238040 - RNA, 84 nt, Homo sapiens
gcgccacgcaccggacgacgcccggcgccagcacacgcagggaaccagaccgggacagagcccgcacgcggacacgcagccagc

SEQ ID NO: 238041 - RNA, 69 nt, Homo sapiens
aggaaagcgaaggggaaggcgccgaagaggacgaaggggcagccacaccacaggggcgcggcggacggc

SEQ ID NO: 238042 - RNA, 79 nt, Homo sapiens
cggagccagggaggcggcggcgggaacgagggcgagcagaggacgacaggccgggagaaagacaacggccagccaaacc

SEQ ID NO: 238043 - RNA, 81 nt, Homo sapiens
gagaacccagaaccccaaaggaacccaagacagaccaggagaggagcagccggaaagcaacgagacgaacaaccccccgag

SEQ ID NO: 238044 - RNA, 81 nt, Homo sapiens
cgagccgcgcccacccccccgaggacgagacaacaggcacaaagagagaaggaacacccacagggcagacagagaaagaac

SEQ ID NO: 238045 - RNA, 46 nt, Homo sapiens
ccaaacgccccacgaccagagcccaaaaggcagagcgaggagagaa

SEQ ID NO: 238046 - RNA, 85 nt, Homo sapiens
ggcacagccacaccgcaccgcaggccgccccgaccgccgaacaaggaagagagcagccgcaacacacaccaaaaaaaaagcaacg

SEQ ID NO: 238047 - RNA, 71 nt, Homo sapiens
acacgccaccaagccaacagaacagaggacacaagcgaaaagacaacaaaggcggaagaagagcggcgaaa

SEQ ID NO: 238048 - RNA, 104 nt, Homo sapiens
cccgaaagccggcggaccaacgaagagacgacaggacgccgaaggcaaaaaagggccacagagcaaccaaaaaccggccgcaggcacaaaagaagacgggaaaa

SEQ ID NO: 238049 - RNA, 104 nt, Homo sapiens
gagggaaggcacgaggaagagacaacaccagagggccccaggcacccgggcccaaaccagacaaagccacagaaaaccagaagcgaaggaaaaaccacacacac

SEQ ID NO: 238050 - RNA, 75 nt, Homo sapiens
cggggcaagccccgggcgggacagggaccggggccagccaggggaacggggcgacagggaaagaaaaccaagcgg

SEQ ID NO: 238051 - RNA, 69 nt, Homo sapiens
aaagaaaccagggaaaacagccacggaaagaagaccagaccaggaaacaggccgacagcggaaaagaac

SEQ ID NO: 238052 - RNA, 80 nt, Homo sapiens
ccgccccaccggcagcaaggccacacacgcgagcacccagagggccggcccagaacgggacaaaaccggccagccacgaa

SEQ ID NO: 238053 - RNA, 72 nt, Homo sapiens
gcgccaaacgaggcacagcaaagcagcagaacggacagggcaaggaagagaggcaagccagaggacaacaga

SEQ ID NO: 238054 - RNA, 82 nt, Homo sapiens
cgggcacccgcgccgggcaccgaggaccagccaagacagggcaggcgccccaacccaagccagaggaggcacccaggacgcg

SEQ ID NO: 238055 - RNA, 60 nt, Homo sapiens
caccaccaacggaaaacaacacaggggaggacgcgagcggaagagaagcaaaaagacaag

SEQ ID NO: 238056 - RNA, 58 nt, Homo sapiens
cgcagacgcggggcccgggcgagcggggcaagaacgccccggcaaggacggaggcagg

SEQ ID NO: 238057 - RNA, 78 nt, Homo sapiens
gcggcggagccaccaggggcagggcagaagggcgcggagggacgcacccccacagggcagaagaggagccgccgcgcc

SEQ ID NO: 238058 - RNA, 80 nt, Homo sapiens
agacggcaaaggcaagagaacagcagcgccgcccgccgacagccaggcccgggagaacagacggcccaaccagagaaagg

SEQ ID NO: 238059 - RNA, 89 nt, Homo sapiens
cgcggggcccgacggcacccgaacgcagggagcgccgcggagaggggccggcgcccggcggggacgcagccagagacccagagcagcag

SEQ ID NO: 238060 - RNA, 82 nt, Homo sapiens
ggaggccagaagccggacagcaaggaaggagaaggcagcagcaccaagaaaccagccccgaaaagaagccgcagagaagaaa

SEQ ID NO: 238061 - RNA, 82 nt, Homo sapiens
aagcgcgcggagcgcgggaggagacagggaaacgaaaaccaccgggcaccacgagcccacgagagaggacagccccaggaag

SEQ ID NO: 238062 - RNA, 71 nt, Homo sapiens
ggcagggcgcggaggaaaccagaccgcaaaacgggacaagcccgcacgcgcagagacaagcccgcgcgcga

SEQ ID NO: 238063 - RNA, 85 nt, Homo sapiens
gcccgcaggagcgcggcggcgaagcggagagcaccggggggaggagagggagggcccggaagaaaacaggccagagcaggcgccg

SEQ ID NO: 238064 - RNA, 76 nt, Homo sapiens
caagaggagcccgcaaaaccacaccaaggaccgccaccacccaaggagggcaagggcagacgggggaggaggacgc

SEQ ID NO: 238065 - RNA, 80 nt, Homo sapiens
gccccgcgagaggcccgcccagcaagcccggaagcggagcagggccaagccgcccgccaaccggcagcgccgacgacaaa

SEQ ID NO: 238066 - RNA, 77 nt, Homo sapiens
cgaggcgcggccgcggcggccgcgccccagggcgcggggacgacgccacagagaagcaagggacaaggccccgcagc

SEQ ID NO: 238067 - RNA, 62 nt, Homo sapiens
ggccgggggacccgcccgccaggccaccaagggaaaggaggcagcccgagagcagcacccac

SEQ ID NO: 238068 - RNA, 59 nt, Homo sapiens
agcaggccaccagacagggcccacccccgcaccagggccacaaagcccagacaagcgca

SEQ ID NO: 238069 - RNA, 75 nt, Homo sapiens
gcgcggcccgcccgcccagaggcagaagcgagaagggacagcgcgggacccagggcggagaaacggggagaagcc

SEQ ID NO: 238070 - RNA, 78 nt, Homo sapiens
agaccaagagaaggcagccgagcaccgagccagcccaggaaaaggagagaacgggaggagggaagaaaagcgccgacc

SEQ ID NO: 238071 - RNA, 85 nt, Homo sapiens
ggcggcccccggcgggggcgggacagcggcccccggagggggcagcccgggagaaccgcggcggccggagcgaggcggacacgag

SEQ ID NO: 238072 - RNA, 48 nt, Homo sapiens
ggcaacacgacaaagcggcccaaccgggggaggaaacaaaacccacga

SEQ ID NO: 238073 - RNA, 92 nt, Homo sapiens
gggcgagagggcaccgcggacggggccgcccaggaaaaccagagacccagacacgcgaaggaacgaaaggccaaaaggcaaaagacgacgga

SEQ ID NO: 238074 - RNA, 69 nt, Homo sapiens
ggagcccgaccgggagaggacaagaccacgagccagacccagccagagagcaaaaaggaccccgccgaa

SEQ ID NO: 238075 - RNA, 78 nt, Homo sapiens
cagcccccgagggcgggacacagcgaagaaaagggacggccagagcccgaagaagaaccagaggagggacagaggccc

SEQ ID NO: 238076 - RNA, 81 nt, Homo sapiens
gcgccgcagccgcgagggcggcacaccgcgaggccgaggaccacgcgaaaagggcgacagcaagccagggggcagagaccc

SEQ ID NO: 238077 - RNA, 56 nt, Homo sapiens
gaacaacacaaagcacaccgccaaacccaggccagagcacagaacagagagaaggg

SEQ ID NO: 238078 - RNA, 59 nt, Homo sapiens
gaaagacgaaggcgaacaggaacaaagagagagaaggcacaccggcagcaccacaaacc

SEQ ID NO: 238079 - RNA, 67 nt, Homo sapiens
aaccccagcagagggccccccgccaccaaaggcccaggagagagggaaagggaacccggaacaagga

SEQ ID NO: 238080 - RNA, 79 nt, Homo sapiens
gaacgacaagcaaccaaaaaagaacgggggacgaccccccagagccaacacacagaagagacgaagcaaagaagagcgc

SEQ ID NO: 238081 - RNA, 88 nt, Homo sapiens
gcaaacacggacacggagcagagcaaccccagccagaagacagcgggggaagcagggaaaaagcagaaggccccaaagaagagaaaaa

SEQ ID NO: 238082 - RNA, 65 nt, Homo sapiens
cggccccggcccacaggggggggcaaacccgagagaacggagaagagacgccaacagaccgggga

SEQ ID NO: 238083 - RNA, 73 nt, Homo sapiens
cccaacccggcaccccacagcccagggaaggcaccaaaagggggggcaggaaagggcgaacagagccagacgg

SEQ ID NO: 238084 - RNA, 76 nt, Homo sapiens
ccgggggccgccgggacccggccaccagcaagccgagacaagagagacgacagcaggagcggcgcggaggcgcagc

SEQ ID NO: 238085 - RNA, 70 nt, Homo sapiens
acagcccagggcgcaaagcgaacggagcagacccgaagaacggccagcaacagaagaaagcaagcaccgg

SEQ ID NO: 238086 - RNA, 73 nt, Homo sapiens
cacccagcgaagaagaaaccagagccagcccgagaagcaggagagaaagaagccaagcgaaaaaccaaaccag

SEQ ID NO: 238087 - RNA, 77 nt, Homo sapiens
ggacagagcccgcccccaccccgcccagaaacggagggggcccggaccggggcgcagccggagcgaagaacaccaca

SEQ ID NO: 238088 - RNA, 80 nt, Homo sapiens
ccgagcccaccagacaccggccagcacggggggggcgcgggggcagcccgggccgggaccagacgggagcacccgaacgc

SEQ ID NO: 238089 - RNA, 42 nt, Homo sapiens
ggaacggaaacaaaccaagcaccgaagaaaaaggagcaagac

SEQ ID NO: 238090 - RNA, 90 nt, Homo sapiens
cccgcgcccccggggccgcggagccagaagagccacgaacccccgaacaaggagccgacgggccagcacaacggccgcgagcagccaacg

SEQ ID NO: 238091 - RNA, 78 nt, Homo sapiens
gggcagaaaaacaggaggaagacccgcagcgggacaagcgggcaagacaaagacggaccaacggaaaaacgagccaga

SEQ ID NO: 238092 - RNA, 78 nt, Homo sapiens
agcagggaagacgccgcgccaccgagccggaccggagacggggccaacagggacaaaacacgacagccccaagccccc

SEQ ID NO: 238093 - RNA, 75 nt, Homo sapiens
cgccagggcgcacaacgaagagaacacgcaggaaacgcaaccggacagaagaggaggcaaggaaagcccaaaacc

SEQ ID NO: 238094 - RNA, 74 nt, Homo sapiens
cagagggcaagaacgaaccaaccccacaacaccgccggagacagccaagggggggaaggagacgcacacccaca

SEQ ID NO: 238095 - RNA, 81 nt, Homo sapiens
accacccacccaaggaagacccacgccacaccaccccccagacacccagcagaaacaagaaaaacaaccaaagaaagccga

SEQ ID NO: 238096 - RNA, 64 nt, Homo sapiens
ccaagacacaccaccgagcggccggacggcccggcagcacaccaagacgcccgacacagaagcc

SEQ ID NO: 238097 - RNA, 41 nt, Homo sapiens
aaaacaaggcccaagcggggccggggacacaagcaacagcc

SEQ ID NO: 238098 - RNA, 67 nt, Homo sapiens
ggacagaggcgccccggcccagaaccaggggggagccagcacgaacgcacccaacggggagccgggg

SEQ ID NO: 238099 - RNA, 73 nt, Homo sapiens
acggccaaaacaacccgcagccagagaacaggaacaacccagacacccgggccagcacaaacccagaaaccag

SEQ ID NO: 238100 - RNA, 89 nt, Homo sapiens
agcgcagccaggcagagcccccgagcggcgcggaagcgggagaagcgcgagacggcacgaggccggcccaacagcgcccggaaccgccc

SEQ ID NO: 238101 - RNA, 77 nt, Homo sapiens
agggccaaggacggaacaggacaaaggccgcaaggccggccgacaacaccgagcaaagaaaaaggggggaccggacc

SEQ ID NO: 238102 - RNA, 71 nt, Homo sapiens
cccaaccacacgcaacaaccagcagcacagaggcaccaccgcagccggcccagcccgcggcacggccgggg

SEQ ID NO: 238103 - RNA, 73 nt, Homo sapiens
ggccgaggcgggcgcaagagaaggcaccaagaggagaaccccacaccagaaccgaccgaaccggagcacccga

SEQ ID NO: 238104 - RNA, 57 nt, Homo sapiens
agaggcgggcggagggcacaccagaggggaaagcggcaacggggaagaagacgcgag

SEQ ID NO: 238105 - RNA, 79 nt, Homo sapiens
cgccccgcccacagcgcggcgcggccgagagccgcggcccggcggaaaggacagcagacacaaccaaagcccaccagag

SEQ ID NO: 238106 - RNA, 58 nt, Homo sapiens
ggaccaagaaccagaacagccaggccgcagacagcacccaccgcccagcaggcgaccg

SEQ ID NO: 238107 - RNA, 36 nt, Homo sapiens
ccagaagacggaaaaaacaggaaaccagacaaaaga

SEQ ID NO: 238108 - RNA, 54 nt, Homo sapiens
ggacgcagaccaggacggggcacacaagcaacagaagaaaaggagggaagaggg

SEQ ID NO: 238109 - RNA, 68 nt, Homo sapiens
gacgcgaggagacccggcggaggaagaaccggaaaaccaagggccgcaagaaaaggagaagaaagaag

SEQ ID NO: 238110 - RNA, 61 nt, Homo sapiens
cagccggcccagagccgggcccggggaccgagcccggaggggcgccacaaaccaagcgcga

SEQ ID NO: 238111 - RNA, 77 nt, Homo sapiens
ggacaccggaaacgcgggggccaccacggaccgaacacaggccagaagaagagacaaggcggcccaagaccccgagg

SEQ ID NO: 238112 - RNA, 72 nt, Homo sapiens
accggaggcccggaagggggcccacagacgacgcgccgcccggacagccccccaaggagagccaacggacca

SEQ ID NO: 238113 - RNA, 100 nt, Homo sapiens
ggccacagaaccagccacagcggggcggagagacaagggaggcgaggacggacaaaaggaaacggacgggaggccagccagcagaaggaggaaccagccc

SEQ ID NO: 238114 - RNA, 82 nt, Homo sapiens
ccagaaaccgccaaagacggaaccgccacagcaccaaacaaagggagccaaaggaaaaaagaccccagacccgcagaaaacc

SEQ ID NO: 238115 - RNA, 70 nt, Homo sapiens
ggagcagccagcagcacccaccacacagggaacgaggcaaacgaagcggagcggacacggagcaggggga

SEQ ID NO: 238116 - RNA, 60 nt, Homo sapiens
cggagcagccagccagcagacgggaacaagggacgaaagcaagcccgaaggaacaacacc

SEQ ID NO: 238117 - RNA, 82 nt, Homo sapiens
gaccccagcgcgaccccaggagaggagacgccggagcgggacgaccagagaccgagagcggcgcgcaccgcggcacgcgggc

SEQ ID NO: 238118 - RNA, 68 nt, Homo sapiens
ggcaccaccaaaaaggagcacgaaaaaggaagggaacaacaaaggaaaaacgaaaacaccaccaggca

SEQ ID NO: 238119 - RNA, 77 nt, Homo sapiens
agccagcgagcgaaccagaccaaaaacgcaacaacagacggaacgcaagcacaggaccagaaacgaaaggcagcaga

SEQ ID NO: 238120 - RNA, 72 nt, Homo sapiens
accggcagcgaacaaggagaaagccacaacagggcggcaacaggggcgagaaaggcggcacaaaacgacccc

SEQ ID NO: 238121 - RNA, 54 nt, Homo sapiens
ggaagaagagaaagaaaaccagcaggggaaagcgcgagcgagcacccggagcag

SEQ ID NO: 238122 - RNA, 76 nt, Homo sapiens
gcggaacaggacgccccgagacaggccccggaacaagaggaggacagaaccaggcgaggaggaagggggaacaaag

SEQ ID NO: 238123 - RNA, 66 nt, Homo sapiens
gaaaccacagcaaccaaaaacgagcagaagaaacacaagcaaggaaggaaagcaaacaaaggcaca

SEQ ID NO: 238124 - RNA, 113 nt, Homo sapiens
cacccgcgcgcgcccgggaggaaggaacgaggcaaggagcaaagcagcggcgcagcccgggcaccaagaaggcggagaggaaagagagggaccaccgaaaaaccccaaaccca

SEQ ID NO: 238125 - RNA, 66 nt, Homo sapiens
caggaaaggcacaacggggagaaagaaggcaaagaagggaagaacccaagaggacagcggggaccc

SEQ ID NO: 238126 - RNA, 72 nt, Homo sapiens
gggcaaaccggcaggcgcccggacacagaagaggacagggcaagaaacacggcagggcagagagcgaaacgc

SEQ ID NO: 238127 - RNA, 79 nt, Homo sapiens
ccgcagaggcaaggggccaccaggaggccagggggcgccaggagccagcaccgccgaccgccagcgccagaagccagag

SEQ ID NO: 238128 - RNA, 79 nt, Homo sapiens
gaagccccgacaccaggggacacccagaagcggcgccgccggcaggcacagggcgggcagccccaggcccagagacggc

SEQ ID NO: 238129 - RNA, 72 nt, Homo sapiens
ccgggaaggggagccaccagcccccggaccggaggaaccaccgacaagccgaaagacggaacaacagaaaac

SEQ ID NO: 238130 - RNA, 84 nt, Homo sapiens
gccaacagggacgggaagcgcgaccagagccaggagggcgcggggacgcaacccaacagccggaaagggagcgacccagacaaa

SEQ ID NO: 238131 - RNA, 82 nt, Homo sapiens
cacaggaaaacaacaccagggcaagaagggccccaaggacaccagggcgaaggccagccaggagccaagggggagccgggag

SEQ ID NO: 238132 - RNA, 77 nt, Homo sapiens
cgacggcagaaagaccaggcggggagggaaccggaggccgacaccggccaacccacgggagaggagcaccgggccca

SEQ ID NO: 238133 - RNA, 79 nt, Homo sapiens
aacagagaagacacggaagccaccgggacagagcagaagggcgaaagaccgggccgcagaagaggccccaacccgggcc

SEQ ID NO: 238134 - RNA, 41 nt, Homo sapiens
gcccagagagaccccagaagaaaagaggcacagagagaaga

SEQ ID NO: 238135 - RNA, 82 nt, Homo sapiens
gagggggcacccagcacacccaagacgcggcaacagggagcacagaggaagagagagccggaagccaggggcaccacgggag

SEQ ID NO: 238136 - RNA, 56 nt, Homo sapiens
aacaagaaagggaaaaccgaaacagagcagcagcggcccccggaggacacgcaccc

SEQ ID NO: 238137 - RNA, 62 nt, Homo sapiens
cccgggccccggccgcggggcccggcgaagggcagaagacgaccccgacgcaggccaggagc

SEQ ID NO: 238138 - RNA, 86 nt, Homo sapiens
aggagagaaaggcggaagacgaggaaacaaacagaagcgcacgagaacccaggccgcaaggaacgaaacccaacagagcgccagac

SEQ ID NO: 238139 - RNA, 52 nt, Homo sapiens
agaagcagaacgcaggaggagaacgacagcaagacaaacagagaacaggaca

SEQ ID NO: 238140 - RNA, 73 nt, Homo sapiens
cccaacaagaggacggcggacacagagcagcagacgagccaacgagaagcagagaccccagcggcccagccgc

SEQ ID NO: 238141 - RNA, 77 nt, Homo sapiens
accccccaggacgggcggaggcggggggaccggcgggcgggaacaagcagaaagcacgaacaacgagaacaagacac

SEQ ID NO: 238142 - RNA, 83 nt, Homo sapiens
cccagcagagaacacaggaacaggggcccaaccacccaggagaaaaggccagaccaagcgcaaggcaggcaggcaagaagagc

SEQ ID NO: 238143 - RNA, 66 nt, Homo sapiens
ccgaagggacgaaaaccgaggaacacgagaaccacgaagcacgaaagaaaaaggaagccagagcgg

SEQ ID NO: 238144 - RNA, 74 nt, Homo sapiens
ggaagccaagaaaaccgcggacggacagcagagaaaaagggggacccagaccccaccaccgacccggggcaaga

SEQ ID NO: 238145 - RNA, 84 nt, Homo sapiens
caaaaaggcacagaagggacacagcagggcaagagcgaacgagcaaacacagcagcaccaagaagcagacaaaccgcgacgaaa

SEQ ID NO: 238146 - RNA, 52 nt, Homo sapiens
agaagagaagaagagggagccggacaagacaaggacagagagagggcaccag

SEQ ID NO: 238147 - RNA, 82 nt, Homo sapiens
caaacaagaggccgcagcggcaaggagagacgcgcgaggggcgccgaagcgagggcaagaccacgagcagacccgccaagaa

SEQ ID NO: 238148 - RNA, 83 nt, Homo sapiens
gccccgagcgggacagcgcggcggggagcgacgagagcacagcaagcgggagcaggcagaccaaaggaacagaagccagggcc

SEQ ID NO: 238149 - RNA, 79 nt, Homo sapiens
cgcaccgccaccggcccgacccaggagaccggcgacggccggcgacacccccaccgccacgggcaaccgcgcgcggccg

SEQ ID NO: 238150 - RNA, 83 nt, Homo sapiens
gggacgcccccaccacaccgggaggggcggggagaacaccaaaacaaaccggagagcaccccaccccaaggaccaccggccac

SEQ ID NO: 238151 - RNA, 72 nt, Homo sapiens
acgaaagccccacccgccgcagcaagcagagggccacccccaaccaggaccaaagacgaccaccaaagccag

SEQ ID NO: 238152 - RNA, 92 nt, Homo sapiens
agaggaagacgagccgggaggaacggcccggaaacaggaggacgcccgggcccgccggccacaccacacgcccccgccgcccacaacgccgg

SEQ ID NO: 238153 - RNA, 65 nt, Homo sapiens
gagaagaaccaaagaagcaaaacacgagaacaagcagaaaacagaacgcaagacacaaggaacac

SEQ ID NO: 238154 - RNA, 87 nt, Homo sapiens
ccgcggccggaccgagcgcccgacccggcgagaacaccagcaggaaaaaagagcggcagaaggccaaacggccgagcaggcgagcga

SEQ ID NO: 238155 - RNA, 77 nt, Homo sapiens
agcgagagaagcggcggaggacgagcccgggagcgacccgcgcaaacaaacagggacaaagacaaccgagaggccac

SEQ ID NO: 238156 - RNA, 82 nt, Homo sapiens
gggccagggcgcccgcgcgccaacacaccgaggggaacacaagaggccccaacgcaggggagcggccggggacacagcaggg

SEQ ID NO: 238157 - RNA, 79 nt, Homo sapiens
gcacccagcagccaacgcccagcggaccagggccacccgcaggcccacaaccgggcacgaggaaacccccagcaagccg

SEQ ID NO: 238158 - RNA, 65 nt, Homo sapiens
aagcaacacgaaacaagaacccagacaggagggcgaaaggaaccagagcagacaagacgcacgcg

SEQ ID NO: 238159 - RNA, 66 nt, Homo sapiens
ggccgggaggcagaggggcagggggagggaagagacgaagggaaaacgagaggggaaagagaagac

SEQ ID NO: 238160 - RNA, 71 nt, Homo sapiens
gaccacacgcgcacagggagaggacagagacgaggcgggcccaagggcaccaccggcacccacaaagaggc

SEQ ID NO: 238161 - RNA, 61 nt, Homo sapiens
gcggaggccgaggacccggggccgaggagcgggaagaggcgggcggggacgacgagcccac

SEQ ID NO: 238162 - RNA, 73 nt, Homo sapiens
gccacgcccccacgaccggacggacacccggccagcgacgcccaccggcagggaagaagggagcaccggaaag

SEQ ID NO: 238163 - RNA, 60 nt, Homo sapiens
caagacccaggccacgccgagccgccaggcagcaggacggaaggccgaaaggcgccagcc

SEQ ID NO: 238164 - RNA, 100 nt, Homo sapiens
ccaggaaagcgccgacagcccggggcagcgagccagcaccgcggaccgccaagagaccgaaggagcagacgaggcacgagcgccagcgcgagacagacgg

SEQ ID NO: 238165 - RNA, 74 nt, Homo sapiens
agaggccaagagcccaacaccacccgagagccccaaggggccagagcaggccggggcaccaagggcggcacaca

SEQ ID NO: 238166 - RNA, 53 nt, Homo sapiens
gacggcaagccagaacgcaaggggcaaaagaccagaagaccaggaagaccaag

SEQ ID NO: 238167 - RNA, 85 nt, Homo sapiens
gcggccccccagccgcggagaaggagaacgacggcaccggaaggaaggagcagcgcgagggcagcaccagaccagagcacaagcc

SEQ ID NO: 238168 - RNA, 79 nt, Homo sapiens
agaggaccgcaccagcacgcccacccagagggaagcacaaaggagagaaacacagagaccccaccgcaggacgcaaagc

SEQ ID NO: 238169 - RNA, 56 nt, Homo sapiens
ccgcccgccgaccgcggcagacggagagggaaagggcgggggcaagacccagagaa

SEQ ID NO: 238170 - RNA, 59 nt, Homo sapiens
ggaaaggcgccacaagggacaccaagccccacccaaggggcagagaaagagcgagaggg

SEQ ID NO: 238171 - RNA, 76 nt, Homo sapiens
aaaaaccagacggaagcgacgacggcaggaagaaaacgagccaggaacaaagagcaagaagcacaccgacccccaa

SEQ ID NO: 238172 - RNA, 80 nt, Homo sapiens
acacccacagaccaccaacaaggaggcggaaaagggaagacagacggagaaggaacccggccgggcggagcagcgggaag

SEQ ID NO: 238173 - RNA, 41 nt, Homo sapiens
ccgacaccccaggaacacaagcgagcgaagaccaaccgagg

SEQ ID NO: 238174 - RNA, 108 nt, Homo sapiens
gccagaggcagaaccccaaaaccagcagaccacagacccacagcgaaagcaacaggagggcagcgggaacgaaacagagcagaagcaacgagcacaggcggagccaac

SEQ ID NO: 238175 - RNA, 70 nt, Homo sapiens
gaaagaggaagaaaccagcaccgggaccggaacgggcgggcaggaggaacagaacaggagcagcagggac

SEQ ID NO: 238176 - RNA, 56 nt, Homo sapiens
agaagcgcagccgcaccggccaagggaccaggcccggagacgcgacgggcaccaca

SEQ ID NO: 238177 - RNA, 76 nt, Homo sapiens
ccccggcacaggcaggagcacgcgaaaaaccagaccaaacgaaacgcccgcacagccaaccgaggcaaaagaaaca

SEQ ID NO: 238178 - RNA, 67 nt, Homo sapiens
gacagcgacggcaaaagcgcaaccagggagagccggaggagccaccaacagaagcaggagccaggaa

SEQ ID NO: 238179 - RNA, 72 nt, Homo sapiens
aaaaccaccccgcacgcaagacaccaagggacgcagcggaagaaaagaaagacgccaaacgcgaaagggaga

SEQ ID NO: 238180 - RNA, 68 nt, Homo sapiens
gagccagacagcagccaagcccgccgacacagccaccaagaaggcacaagcagaacgggaaaaggggc

SEQ ID NO: 238181 - RNA, 67 nt, Homo sapiens
gagaacgaccaacaccaggacggagcaggagaacaccaaaggcaagcaccggcagaccgagcaggag

SEQ ID NO: 238182 - RNA, 58 nt, Homo sapiens
cggaaggcagcgcccagcagcgcagagcaagccaaccaaaaccaagaagggcaggcag

SEQ ID NO: 238183 - RNA, 73 nt, Homo sapiens
cacgggcgggccggccccggcggccagcccgcggcaccccgcggacagggcggcccccgggcgcgccggacag

SEQ ID NO: 238184 - RNA, 37 nt, Homo sapiens
ggcagcccacacggaacaaacgagaaaacaagggaga

SEQ ID NO: 238185 - RNA, 77 nt, Homo sapiens
ggagaacaagcccacgcacccggcgcagcaccgcccgcggccaagggccagaggcgcgagggacggggccacgagca

SEQ ID NO: 238186 - RNA, 80 nt, Homo sapiens
ccacccccgaacgcggcagcgcagaggaggaggcacaccccgggcaggcgaggaggcggggcagccaggcagacagcccc

SEQ ID NO: 238187 - RNA, 69 nt, Homo sapiens
gcaagggaaacaaagacagaagcacgaaagagcggaaccacaagccaggaggaacgcacacggcccgca

SEQ ID NO: 238188 - RNA, 60 nt, Homo sapiens
aacgcaccgaggagaagaccaggaggcgggccaagggcgggcacaaaccgaagaggacaa

SEQ ID NO: 238189 - RNA, 76 nt, Homo sapiens
gcccaaaaggagaggcgacacaaaagagcgcagcaaggagaaacagggaagacagaaggaagcaaagacagagcaa

SEQ ID NO: 238190 - RNA, 81 nt, Homo sapiens
aagccccagcaccagccagagccagacacggcagcgacaccagaaaaagaggaagcggagaccagggaaggaacgagccag

SEQ ID NO: 238191 - RNA, 69 nt, Homo sapiens
ggagccacacaaacaccacaaacaccaccagcagaccagaaagggacgagcaggagagcggaacacagc

SEQ ID NO: 238192 - RNA, 75 nt, Homo sapiens
aaggaccaaacaccaaaacagaaggcggaggaaggcccagaccagcacaaaacagaacgaaaaagcggaagaaca

SEQ ID NO: 238193 - RNA, 71 nt, Homo sapiens
ggcacaagccgggcggggcaaggagcggcggcgcggacgagggagagcggaggagcccgcggaaaaagccg

SEQ ID NO: 238194 - RNA, 74 nt, Homo sapiens
cagacaaaaggagagacgccagaagcaaccccagaccagcggcgccggagcaccggagcagaagaccgagcccc

SEQ ID NO: 238195 - RNA, 72 nt, Homo sapiens
caagccgggaaagggacaagaagggcaaagccgaagacagggggaccgcccaggccaagggagagaaggacc

SEQ ID NO: 238196 - RNA, 87 nt, Homo sapiens
cggaggacgcggcagcccgggagcggcgagggaaaagcgaggcaaggcaggcggaagcaggccaacagaccagcagcagcgcgaaaa

SEQ ID NO: 238197 - RNA, 80 nt, Homo sapiens
gaggaggagccagacgacaagcacacacaggcgcgaaacggaaaaagcggaaaagccagggcggaaaccggcaagaggaa

SEQ ID NO: 238198 - RNA, 78 nt, Homo sapiens
caacaccagcccccggcccagccgcgccgcgcgcagaccagccggccagccccaaacagcgcgaagcaaggaaaagaa

SEQ ID NO: 238199 - RNA, 68 nt, Homo sapiens
agcagaaagcggggagccgaaaagggagaaagagagaaagagcagaaacgaaccagaagaagaacgga

SEQ ID NO: 238200 - RNA, 88 nt, Homo sapiens
gcgggaggcgcggagcaggagcccggccaggcgcggggaaagacaaggacgaggcccaaggaaacggcggcgccagcaggacgcgcaa

SEQ ID NO: 238201 - RNA, 68 nt, Homo sapiens
gccgacgggcccaccgggaggaacagaagaggcgccccccgggggagggcaggaaggaggcgaggcga

SEQ ID NO: 238202 - RNA, 72 nt, Homo sapiens
aaccagaaagccaggagccacgcaggagggggacgggacccggaggacgacgcgcggccgggcgccccccgc

SEQ ID NO: 238203 - RNA, 79 nt, Homo sapiens
cccagcccggggggggcgccggcacccacccccgcgcgcggcgcgacagaaagccaccccccccgaccaccaccgcggg

SEQ ID NO: 238204 - RNA, 75 nt, Homo sapiens
agagcaggacaagagaaaggcagaacaaagaaggaaccccagaagagaagaccacacaagaaagggagggaggcc

SEQ ID NO: 238205 - RNA, 66 nt, Homo sapiens
cgcggccggccacgcggaagagaagcccagacacgaagaagagagccagagcacaagaaagacacc

SEQ ID NO: 238206 - RNA, 44 nt, Homo sapiens
ccgacaccccgcacacgcccaaggagacgcccaaggagaaccaa

SEQ ID NO: 238207 - RNA, 80 nt, Homo sapiens
gcccgccaaccccaggggaccagaggaaccagcccgagcgcgcccagaggggggagccaggaccgcccaacgaggaccag

SEQ ID NO: 238208 - RNA, 74 nt, Homo sapiens
aaaaacaggacccgaaacacaaaaccagacgagagacagaagacgaaagggcaagaaagagagcacggacaaga

SEQ ID NO: 238209 - RNA, 85 nt, Homo sapiens
cgccgcgggcgccagaaggaagaggcggacggaggagcaggcgagaagagaagagcagcccgacggccaggaggcgaagagacga

SEQ ID NO: 238210 - RNA, 78 nt, Homo sapiens
cccgggcccggaccacagaagcagcgaaggaaggaagacccacaagagaccacgcagagacagcacccaaccggcagc

SEQ ID NO: 238211 - RNA, 71 nt, Homo sapiens
cgaagcgaggcggaaaacgaagacagcacaccgccgcggggcgggccacagccacgaacacaagacgcaca

SEQ ID NO: 238212 - RNA, 87 nt, Homo sapiens
ggggcggcgagacagcggcggcgacggcgcggaggccccgggcgcggcgcagaaccagcccccccaagccccggggccagccacaag

SEQ ID NO: 238213 - RNA, 75 nt, Homo sapiens
cccagcccccaacgcgggccaggagaccggagggcaacagagcccagaggggggaaacaggccgagcagcacgcc

SEQ ID NO: 238214 - RNA, 75 nt, Homo sapiens
caggcgcacaccaccagccgcggacgcccgggacgggaggagccaaggcccgagagacacgcggggccgggacca

SEQ ID NO: 238215 - RNA, 80 nt, Homo sapiens
gaccccaagacggccacggaggagaccacaaacagccacaaggaaagaaccccgaaacacaaggaacaaaaaggacacaa

SEQ ID NO: 238216 - RNA, 60 nt, Homo sapiens
gagcacgcacgccacgaagacaggacaaaccccccccccgggcggaccccccacagcagg

SEQ ID NO: 238217 - RNA, 76 nt, Homo sapiens
ggagaagagcagagccaacagcacaaaggcgaaaaagcccaacccccaaagccaaacaggccaaaccacacaaaag

SEQ ID NO: 238218 - RNA, 82 nt, Homo sapiens
ccggcccgcggcccggccccgcggcccgcgcggagcggacgcgcgggcgcgcccggaagaagccaaggggagcagccacagg

SEQ ID NO: 238219 - RNA, 74 nt, Homo sapiens
agggcgcgagcgcccggggcacgcccgcggccgccggacggccgggcgcggagccaagagaaaccaccaagagc

SEQ ID NO: 238220 - RNA, 83 nt, Homo sapiens
gaaggcgggcggcagaggcgacagacaagcagaccggaagaccgacggaagaccacaccccgagggagcccaggacaccacga

SEQ ID NO: 238221 - RNA, 76 nt, Homo sapiens
ggccccagacgagccgagaaggggggcgcccccgagccacagcgaaacggccgcggggcaccagaacggacaaacc

SEQ ID NO: 238222 - RNA, 67 nt, Homo sapiens
ggcacggggagcaaagaggaccacaccagggcggagaaagaaggaccggagagaacagaaaaaaagc

SEQ ID NO: 238223 - RNA, 80 nt, Homo sapiens
caccgggagcggcgaagaggcaccggaggagcgaggaagacagccaagcagagaaacgaaggagcgacaaggagaccggc

SEQ ID NO: 238224 - RNA, 88 nt, Homo sapiens
gaggaagcagcagaagagaagaagaagcaggagaacgaaacggagccagagaaggcagaaggcagggacggcccagacagcaggcaag

SEQ ID NO: 238225 - RNA, 57 nt, Homo sapiens
aagccacagggagggacgcgcagggcccggcgggacagacgaggcccgcgccagcgg

SEQ ID NO: 238226 - RNA, 71 nt, Homo sapiens
acggaaaaaccagccgcacgccaaggaaacaggaaagggccgagaaagaagagaggaagaagaggaggagg

SEQ ID NO: 238227 - RNA, 70 nt, Homo sapiens
ccggggacccggcccgggaccggcggcgcgcggcggccgaggccaggccggcaagaagccaacggagaac

SEQ ID NO: 238228 - RNA, 78 nt, Homo sapiens
ggcaacaccagcagacggggcgaggggacccaagggagagagggaacggcgaaagggcagcccggaaggagcaccacc

SEQ ID NO: 238229 - RNA, 75 nt, Homo sapiens
cgaggaggcggagcggacaaaggccaaagccgacagaaaaggaagagacccagcgaacaagaggaagacgagggc

SEQ ID NO: 238230 - RNA, 71 nt, Homo sapiens
ccgcgccggcccagcacgcccggaagccagacgcgcagccaaccgacaggcggaaccacacgcacgagaac

SEQ ID NO: 238231 - RNA, 74 nt, Homo sapiens
gaagcaaaacccagagaagagagaagaacaccgaaaccagaagggggacaggcacccaccgcaggcaagaacag

SEQ ID NO: 238232 - RNA, 77 nt, Homo sapiens
ggcgcgaccggcggcggcgcgaaccggagggacggagggcaaccaggaagaaggggacaccaacagagagaggcacc

SEQ ID NO: 238233 - RNA, 102 nt, Homo sapiens
cagagcacaccagccccccgggcacccacccacccagcccagccaaaggccggcccacagcccaaaaagaaacaggaccgaaagccagagcgaagccaaagc

SEQ ID NO: 238234 - RNA, 74 nt, Homo sapiens
gaagagaaaagaggaagaaaaggggcgagaggcaagacaaaagaaaaccccagacggaaagaggaagcggcagg

SEQ ID NO: 238235 - RNA, 76 nt, Homo sapiens
ccagggaagaagaaacccaagcccacccggggaagaaaacgccagagaagcagagcagcccggagcgaggggagac

SEQ ID NO: 238236 - RNA, 56 nt, Homo sapiens
ggggcgcaccgccaagagcgggggggggaagaaagaaggagaaggcggaggaggga

SEQ ID NO: 238237 - RNA, 73 nt, Homo sapiens
gaccagacaaagccagacaaaccggggagcacacagagagccgcggagggaaagccaaaacaggaaacaggaa

SEQ ID NO: 238238 - RNA, 78 nt, Homo sapiens
ggaagaaagagaaaccaggcccaccccagaacgccaaagacccccagggcgcacaaagagcagggaaaccggccagag

SEQ ID NO: 238239 - RNA, 71 nt, Homo sapiens
ccgggacccaccacccaggccccgacgccccgaggcgggggcagagggaagcggacccccggggcccgcga

SEQ ID NO: 238240 - RNA, 75 nt, Homo sapiens
agccaagaagcaaggggaccagcaggcggggggggagaagcaaccacagacacaacaagcgaaacaagcacagcg

SEQ ID NO: 238241 - RNA, 93 nt, Homo sapiens
agaccggaggcagcacaccaagaggaacagaccggagacgagcaccagccaccccgagccagaaagaccacgccgcgaggcaaacgcaaggga

SEQ ID NO: 238242 - RNA, 75 nt, Homo sapiens
agagaacaacagccaagccggacaaccaaccgcaggaaggaaacaaccggaagaaagggaaaagggagcggaaag

SEQ ID NO: 238243 - RNA, 78 nt, Homo sapiens
cgcccaacccaggcaaaagcagcaccaacaaagagaaaagagacgaggcggcccaaacaggcagcgagggccggaaag

SEQ ID NO: 238244 - RNA, 64 nt, Homo sapiens
ccgcgaaggcgggggagacgaaaacgcaaaaaaccgacacaagacgaacgcacaaaacaaggcg

SEQ ID NO: 238245 - RNA, 58 nt, Homo sapiens
ccggccgagaaggcagaggcgaaagcaggagcccggaaaggagaaggaaaagacggca

SEQ ID NO: 238246 - RNA, 79 nt, Homo sapiens
cggagcgcggcggagaggagggggacgaagcccccagaaagacaccgagaggacggcagagccaaagcagacccccaag

SEQ ID NO: 238247 - RNA, 67 nt, Homo sapiens
cagcagccgagaagaaggaccagcacccaggaaggggaggagcacagaacgccaggaccaaaacagg

SEQ ID NO: 238248 - RNA, 82 nt, Homo sapiens
agaagacccaaagggcggaggagacaggaacacagacggacagcacaccaccagccacggaagaagcacaccacaccaaaaa

SEQ ID NO: 238249 - RNA, 67 nt, Homo sapiens
ccggagcacggaggggacgcaacaagggcagcaggcaagagaaaaggcgagggcaggcagcggacgg

SEQ ID NO: 238250 - RNA, 75 nt, Homo sapiens
ccccgggggggcccgaggagccagcaccgccgaccgccagcgccagaagccagagagggcggacagaggaagagg

SEQ ID NO: 238251 - RNA, 82 nt, Homo sapiens
ccgggacgcggagccgaagccggcggacggcgacgggcggccggcgcgaggcgagaaacgcacagcaacgaccccccggacg

SEQ ID NO: 238252 - RNA, 74 nt, Homo sapiens
gccgacaagggcagaacgaacaggaacaaagccagacgcggagaaccccgccaaccagaggcaagcacaaacca

SEQ ID NO: 238253 - RNA, 73 nt, Homo sapiens
gagacgggccgcacccgccccccgcgcccgccaccggccgccgcccggagggagaagagacaaaccgggacca

SEQ ID NO: 238254 - RNA, 77 nt, Homo sapiens
cgaggagcgcgcggcgccggggggcgcgccgcgaccgcccgccgggcgacgagaagagcaccccccagagcaccgac

SEQ ID NO: 238255 - RNA, 70 nt, Homo sapiens
cgcaagcgcagcgcaacagccaccacagagaagacaccgaaacggcgcacaccacaggccaaacacaggg

SEQ ID NO: 238256 - RNA, 69 nt, Homo sapiens
agacgggcgggagcgcgcccgaacggcccgccgggagcgagaggaacagggagaaacagcacaagaaga

SEQ ID NO: 238257 - RNA, 77 nt, Homo sapiens
gccgcgcacagcccgccgccgccccaacgccgacccaacagaggaagccgcaagaaacgggacgacaggaaggccag

SEQ ID NO: 238258 - RNA, 67 nt, Homo sapiens
gaggaaacccgacagcaaaggcagaggacccgcggccccgcaggggcccgggacgagaagggagggg

SEQ ID NO: 238259 - RNA, 78 nt, Homo sapiens
gaaggcgcgagggacaagagcagacaaggcagcaagccgcggggccccaacccgggcagaccagaggcgcagacgcag

SEQ ID NO: 238260 - RNA, 70 nt, Homo sapiens
ccccaaacaaggcagacaaaaccaaaggaggccaggacaaaaaacacggcgcagagagccagcagcagga

SEQ ID NO: 238261 - RNA, 54 nt, Homo sapiens
gggaggaccaggagagagcaacgccaccgcccggaacgaggcacaacgggagcc

SEQ ID NO: 238262 - RNA, 81 nt, Homo sapiens
agcggggccacgggagggagacacaggacccgcgacgcagaaagaggcagagcgggccgaacgggccaaggagcgggagaa

SEQ ID NO: 238263 - RNA, 65 nt, Homo sapiens
ggggcgcaccgccaagagcggggagcaaagaagggaccaacccgccagagacgcaaaggcacccc

SEQ ID NO: 238264 - RNA, 72 nt, Homo sapiens
agacagcccaggaggagaagcagaggccacagcaacggggcggcacacaaggagcgaagggcagggagaacg

SEQ ID NO: 238265 - RNA, 74 nt, Homo sapiens
gcaggcgagaagagaagaacaagcaaagagcggcaggggcccggaggcacgggcagccaccaccccgaagaaca

SEQ ID NO: 238266 - RNA, 84 nt, Homo sapiens
ggaagcaggacgcgccgcgccccaaggcagccagcacgagcccccccaccaccacagccccccacccacaagccagcgggcgcg

SEQ ID NO: 238267 - RNA, 86 nt, Homo sapiens
ccagaccagggccagacaccaaggagcgcagcagcgcgcagggcagccccagcgagcacccgaggaagggggggaggacgcaccgc

SEQ ID NO: 238268 - RNA, 75 nt, Homo sapiens
ccgccgcccaccaggcccgaggagcgacgaggggcggggaaagaagaggaaccagaaaagaagggaagcggcgaa

SEQ ID NO: 238269 - RNA, 38 nt, Homo sapiens
acggagaaacaagcaaaggaacgcacgaccagcagggc

SEQ ID NO: 238270 - RNA, 57 nt, Homo sapiens
gccgagagcgagaaacaaagccacccagccaagaaggcccgagggaggacggaacag

SEQ ID NO: 238271 - RNA, 55 nt, Homo sapiens
cagaagagcaccccagaaagcgacacagaagccagcggacgacgggggacagaag

SEQ ID NO: 238272 - RNA, 73 nt, Homo sapiens
ggggggccagaagcacaaaaaagaaaccgggacggaaaagaaagcaccaaggagcagagcggagagaggacag

SEQ ID NO: 238273 - RNA, 69 nt, Homo sapiens
gggcccccacacacgaaaggaagacgaggggacaacgaaggaggcaagcaacaaagggacaaaaacgac

SEQ ID NO: 238274 - RNA, 76 nt, Homo sapiens
caagggagccgcgcaaaggccccggcaagaagacaacccccaccccacaccgcacagaaaagccgcccaggcccag

SEQ ID NO: 238275 - RNA, 80 nt, Homo sapiens
aagcggggaacaggaggagccaccgcgcccggccgagcaagaaagaacaggccagacaaacagcgaagagcagaaaaccc

SEQ ID NO: 238276 - RNA, 63 nt, Homo sapiens
ggacgcaagcggggaggggaagggagagaaagccgaagcacaaacggaaagggccagaaggaa

SEQ ID NO: 238277 - RNA, 68 nt, Homo sapiens
ggaccccaagccgaccccgccagggaccagggacagggagcagagcaccagcagcgcgcacccagggc

SEQ ID NO: 238278 - RNA, 85 nt, Homo sapiens
ggagggcccaaggcagaaggaagcaccacacagagaaacgaaggaggcccaaccacaaaaggagccgacggaacccagacggaga

SEQ ID NO: 238279 - RNA, 75 nt, Homo sapiens
ggccaaagaagggagagagggccaaacccaggaccgagcgggaagcaccgaacacccgaaccgcccaccgccacg

SEQ ID NO: 238280 - RNA, 76 nt, Homo sapiens
ggcaaccccaccggccgacagccgcgacggcgagcccgggccgcgcccgaggaaaaagaagggacacggacaggac

SEQ ID NO: 238281 - RNA, 57 nt, Homo sapiens
cgccacgaccgcaagaccggcagggaccgccccagggggacgcccgggcaagcaaca

SEQ ID NO: 238282 - RNA, 79 nt, Homo sapiens
accacccgaggccggggcaccggcccaccacggccacccacagaaagaagcagagggccagacccccgccagaagaaac

SEQ ID NO: 238283 - RNA, 64 nt, Homo sapiens
cagcgcccccaaacggaaacaaccaacccaggagcaaccgggagggagagagaagaaaggagag

SEQ ID NO: 238284 - RNA, 71 nt, Homo sapiens
gaacaaagaaagggaagagacacaaggaaagaaggccaacagacagagcagcacacaagggacgagcagca

SEQ ID NO: 238285 - RNA, 75 nt, Homo sapiens
gaggaggagggcaggcggggaccggggcaaaccgcgcgcagcacgccacagagcagaaagcaccaaggaccaaga

SEQ ID NO: 238286 - RNA, 75 nt, Homo sapiens
gccagccccaaacgcgggaacaggaggcacaagaacgaagcaggaaaaccaaggaacaaccgccggcacggggac

SEQ ID NO: 238287 - RNA, 82 nt, Homo sapiens
cagagagggcccgggaagagagcgaggagacaaggacaaccccccaagcggaagaacaacaaagagggaagaaagaggagaa

SEQ ID NO: 238288 - RNA, 64 nt, Homo sapiens
aaaggggacagcaacagccggcgggcggaagagaagccggccccaaacaggaacacgaagagcc

SEQ ID NO: 238289 - RNA, 82 nt, Homo sapiens
cagcacaaggaagcacaaggagccgcccggcaaagcgaaagcgcaggaccgaggagaaggagccgccggagcagccgcagcc

SEQ ID NO: 238290 - RNA, 69 nt, Homo sapiens
agaccgccgaaacgagccagaagacgggaaacacgggccacagagcccaaaagcaaagcagggcagcaa

SEQ ID NO: 238291 - RNA, 73 nt, Homo sapiens
cccccggaccaccgcccagcaacacggcccggccccaccaaagccaggaagggccaaagccccaagaacccag

SEQ ID NO: 238292 - RNA, 74 nt, Homo sapiens
acaagacggcaagccccacacgcccgcaagggacccggcagcaaccccaacaaacgccagaggcagcccccccc

SEQ ID NO: 238293 - RNA, 79 nt, Homo sapiens
ccgggcgggcacaagacaggcagaaaacgagaggccaccgcagcggcaggacgaaggaggggccgagcagaagaagaag

SEQ ID NO: 238294 - RNA, 78 nt, Homo sapiens
gcagaccgcagaaggccggagacaccagcaggcaccgccacaccaaagaagaggagacaagaagagccggcgccaccc

SEQ ID NO: 238295 - RNA, 71 nt, Homo sapiens
gcgcagcagaaagcaaaccagcaggcaccaaggaaagcagaagacaacaacaacaggcgacgggcccaaac

SEQ ID NO: 238296 - RNA, 80 nt, Homo sapiens
aacgcggaaacaagcaaaaggccccccaagaggaccccgaagaccagcagcccgggccccgcgagccgccgcacccaggc

SEQ ID NO: 238297 - RNA, 78 nt, Homo sapiens
aagaagacaccgacacgaaaacagccagcgacagcccaccacaggaggagcagggccagcgcagaaaacagggaagaa

SEQ ID NO: 238298 - RNA, 106 nt, Homo sapiens
ggacgcgcacgcagagcacggggagagagcgcaaaagacgaccgggccgcccgccggaacagaccaaacgcgaagaaccccccacccggcccggaacggcaggaag

SEQ ID NO: 238299 - RNA, 74 nt, Homo sapiens
aggcggcccggggagacaggagaagggggcccgggcccagacgaaggacgcgaaccccaaggggaacagaaaag

SEQ ID NO: 238300 - RNA, 67 nt, Homo sapiens
gccaacaacccaagggagcgcacgacccacgcggaacggagaacagacaaacacaagaaccccaaac

SEQ ID NO: 238301 - RNA, 74 nt, Homo sapiens
ccaaaaacccacgccaggcggacacaggcaaaaccagcgggggcccaagccccaaggggaagaaagacgggaga

SEQ ID NO: 238302 - RNA, 79 nt, Homo sapiens
agccgcgacacacagcaaggccagcagagcccaagggcgccagccaccacccagacgaccagacgagagcagacacgcc

SEQ ID NO: 238303 - RNA, 72 nt, Homo sapiens
caaccggaccgaacgacacggcggaaacgacgcaggagggcccgacccaggcaagcgagcaggcgagcagga

SEQ ID NO: 238304 - RNA, 79 nt, Homo sapiens
gcgcacccacgaacgcccaccccccgaacccagccgcaccggggacccagaaagaagcacaaaacaaacgacagcagca

SEQ ID NO: 238305 - RNA, 41 nt, Homo sapiens
cgggggcgagcagcgcacccgaaacggcgaggaaagagagg

SEQ ID NO: 238306 - RNA, 82 nt, Homo sapiens
gccccggcgagcagggagcggagaccagcaccaccagcaggcacagacgaaagcgcgcgcgcagggagcagcacccccaccg

SEQ ID NO: 238307 - RNA, 59 nt, Homo sapiens
ccaacggcccgcaaggccaggcaggagcagcaaggccccggacaaacagacacaacaag

SEQ ID NO: 238308 - RNA, 72 nt, Homo sapiens
accagaggacccacagacagaacaaccggaaaaccagagacccagacacgcgaaggaacgaaaggccaaaag

SEQ ID NO: 238309 - RNA, 79 nt, Homo sapiens
aaggaacaacagacaaaacagggaaaaggccacccagccagggaggaccgaacagcagcacaccaacgaaaagcccaaa

SEQ ID NO: 238310 - RNA, 83 nt, Homo sapiens
ggaaaggccggacggcccaaagaggagggcgcacagcgcccgaggacaggacaccagaaaggaagaagaacagaacccaggaa

SEQ ID NO: 238311 - RNA, 41 nt, Homo sapiens
ccacgcagagggcggagcggcagcgccagcagcccgggggc

SEQ ID NO: 238312 - RNA, 79 nt, Homo sapiens
cgacccggacgagaaacgcaagaacggccgagcgaccaggagaggagcccccgcccgaagaccggggagggccccccag

SEQ ID NO: 238313 - RNA, 73 nt, Homo sapiens
gggacacagccggccaggagaaacggggacgagagaggcaaaccaagaacgccaggagccagaaccccgagga

SEQ ID NO: 238314 - RNA, 77 nt, Homo sapiens
gcacagcagaagccgaacggccgaagaaagaagcagaaccgcgccgaagcaaggggagaggagagcagcgaccgggc

SEQ ID NO: 238315 - RNA, 80 nt, Homo sapiens
cgccccgccggccaaacccccagccccggcgcccaccgcagcaaggacgccgcagcaggccgacagcccacaagaagaga

SEQ ID NO: 238316 - RNA, 78 nt, Homo sapiens
ccgggcaggacgccgagcgggacccccgccgccccgggggccggacgggacaagagaaaaaaagggcgggcgaacaaa

SEQ ID NO: 238317 - RNA, 81 nt, Homo sapiens
gcagggcagcggcccccgcccgcagggccccgcggacgccgggccgcgggagagccgggaggagacgcgacggagacgaac

SEQ ID NO: 238318 - RNA, 71 nt, Homo sapiens
caagcaacccgggagcagagaaagcagccaaaacaggggggccggggaggagaaaacaagccaaggccaca

SEQ ID NO: 238319 - RNA, 64 nt, Homo sapiens
agaaagggaagggcaagggggccgaagcaaccaggcccagcaagagaaacaagagccggagagc

SEQ ID NO: 238320 - RNA, 79 nt, Homo sapiens
ggacagggacacaaacaccagagggaaaaagaccacagaaacagaacagagcgggagagccccccacgacccagaacca

SEQ ID NO: 238321 - RNA, 68 nt, Homo sapiens
gcgggccgagggggcgggccggcggggcacggggggcgacggccaagcgcaccaaggagaaacagaga

SEQ ID NO: 238322 - RNA, 89 nt, Homo sapiens
ccgcagcgcgcaccaaacccccggacccggcaacggggcaagacgccaagagaaaaggcgagagcacaaagcaccaagagccgagaagc

SEQ ID NO: 238323 - RNA, 74 nt, Homo sapiens
cgagagccgacccaggccgccggccccacagggaagagcacgggacaggaagaagcaaggccgacgcagcccgg

SEQ ID NO: 238324 - RNA, 85 nt, Homo sapiens
ggccgagagccgcccgggccagcggccgcgcacccccggccggaggcaccagcccccaaaagcacgcacgaaaccggcaagccag

SEQ ID NO: 238325 - RNA, 82 nt, Homo sapiens
accgaaggacacggaggaaacacgaaggcaaagacagagggaaagggagcagcaccggccacacccacagcacgaccggaac

SEQ ID NO: 238326 - RNA, 79 nt, Homo sapiens
ggacagggagaaagggccccaagaggagaagaagacggagccgccgggggggcacaccccagcccgaggacccccaagc

SEQ ID NO: 238327 - RNA, 86 nt, Homo sapiens
gaagcgccgccgaacgacaggacgggggcggccggcccccagacagggagcagagaaacagaaggcacaggcagcccgggacacga

SEQ ID NO: 238328 - RNA, 79 nt, Homo sapiens
agcacacgaaacggaggcaccaacccccacacgcccggggaaccaggacaggcgcgggaggagcgcaggacgaggacag

SEQ ID NO: 238329 - RNA, 66 nt, Homo sapiens
aaccgacaggaaccagacacgcaaacaggagaacccagaaaagccaaagggaaaagaagagaagca

SEQ ID NO: 238330 - RNA, 66 nt, Homo sapiens
aaagagaaaaaacgggcggggggaacagacagccccaggaaaaggagagacagaacagacccagca

SEQ ID NO: 238331 - RNA, 80 nt, Homo sapiens
caagggacggcacccgagggcgcggcgaagccggaaccaaaaagaagccccagagccggggccaggagccccaagcgccc

SEQ ID NO: 238332 - RNA, 57 nt, Homo sapiens
acaagaaaagcgcaagaagaggaggaagccagcgagggcaccagcgcggacggcccg

SEQ ID NO: 238333 - RNA, 78 nt, Homo sapiens
ggacggaggcgcgcgggcccggagacggcagcccggacccccgcagagccagcaagccaagaccacagccgggaccgc

SEQ ID NO: 238334 - RNA, 78 nt, Homo sapiens
cccggggccgcggacgaggaccagcagaggccagcacgagaacccaggccgacgcccgccgcggccggggaacaggcc

SEQ ID NO: 238335 - RNA, 59 nt, Homo sapiens
ccagggagacgcccgccggcccggccaacgcaacagggagcccacgcaagaggggccgg

SEQ ID NO: 238336 - RNA, 72 nt, Homo sapiens
gcgaacagaaagccgccgagggagccgagagggggagaggcaccagcaacagaccaaccgcagcaagcacag

SEQ ID NO: 238337 - RNA, 61 nt, Homo sapiens
gaagccgggagcgagcccaggcggcagggcggagaacggaaaagcaccaggaagcagagag

SEQ ID NO: 238338 - RNA, 79 nt, Homo sapiens
ggagccggcgaggggaagaccaagacaggccggaacccgaaagggagcaggggaaggagacgggcaggagcgagccacc

SEQ ID NO: 238339 - RNA, 73 nt, Homo sapiens
acagaccagaaaaggaaagagaagagccggcgagaaaacgacagaagcacgacaacaacgggcagcaagccac

SEQ ID NO: 238340 - RNA, 72 nt, Homo sapiens
aaaaaaaaaggaacgaaagaccgccaggcacgccagcagcagaacacaggggcaaagaaaaaggagagaaaa

SEQ ID NO: 238341 - RNA, 82 nt, Homo sapiens
acccccgggaagccagaaaaagggacaagaacccaagaaacaggaaaaaacccaaaacaccaaaaggaccagcgagaagaca

SEQ ID NO: 238342 - RNA, 58 nt, Homo sapiens
ggcccgcacggagggaggccagggccccaaagacaggacagggagaggacgagagcac

SEQ ID NO: 238343 - RNA, 77 nt, Homo sapiens
aaaaacagcagaggccgagaaacagagagaaaagagacggagcaagagaacgcaagagacgaggaaacccccagcaa

SEQ ID NO: 238344 - RNA, 75 nt, Homo sapiens
cgccgcccggagggaccaccagaggcgcacacagagaaaaaaagggaacaaaacacagcaagcagacaaaagggg

SEQ ID NO: 238345 - RNA, 104 nt, Homo sapiens
cgccccgcgagcacagagcccgccgccgaccgccgcccgccacacccgccgccagaccgggaaaaccggaggccagcccacccagagaggccgaaaaccggcga

SEQ ID NO: 238346 - RNA, 77 nt, Homo sapiens
gcagccgggaaaccaggagaacacaaagagaagacaaccaaacccaccaccggcagagagggggcaccccagacagg

SEQ ID NO: 238347 - RNA, 73 nt, Homo sapiens
cacagcaaaccgggccacagaggaggaaggaccgagcgcaggaaccaggccagcgcccagcaagcggaaggcc

SEQ ID NO: 238348 - RNA, 73 nt, Homo sapiens
cggcgcgcagggcgggggcgccccaggagccggacagccggcggaagaggaccaagaagggggcagcgcggga

SEQ ID NO: 238349 - RNA, 75 nt, Homo sapiens
gcgggggcaggcggagaaggagacaccggaggacgaagagggggaggaacgccacaggaacgcgaggcagcgagg

SEQ ID NO: 238350 - RNA, 74 nt, Homo sapiens
cacggacaagcgcagggaccgagaaccaagagccgccgcagggcgaaggcgaggacccccagcccccagagccg

SEQ ID NO: 238351 - RNA, 77 nt, Homo sapiens
acggggcaaaccgccgccgcccccaccagacagacgcgcaaaacccagaccccgcgagcaaaggaggaggaccacac

SEQ ID NO: 238352 - RNA, 68 nt, Homo sapiens
ggaaggagccagccacaggcggcggaacggaacagaagcaagaaacacaggggaaacacgagagagca

SEQ ID NO: 238353 - RNA, 39 nt, Homo sapiens
agacggggcaccgagccaggcaggggacagaggcaggag

SEQ ID NO: 238354 - RNA, 42 nt, Homo sapiens
aaaaccaaggggcaaaccagggaaacccagacgacaaggaag

SEQ ID NO: 238355 - RNA, 53 nt, Homo sapiens
cgccagacggacgaggcggcggagaacaagcggcaggacgaggcccaaccaac

SEQ ID NO: 238356 - RNA, 55 nt, Homo sapiens
agagggaagcggcaaaccaaaagagcaacgggccaaaaagcagaaaaacaaacca

SEQ ID NO: 238357 - RNA, 77 nt, Homo sapiens
cagaagggcacccaacccccgacaagcccaggccaggcagaagcaggaagagccccgaccgcaggacgccgaacaca

SEQ ID NO: 238358 - RNA, 90 nt, Homo sapiens
ccaccgcgcagcgcacacgccccagacccaggccagaggagaaggcagagcccccccaggcagaagcccgagcgggaaccagcgaagcca

SEQ ID NO: 238359 - RNA, 46 nt, Homo sapiens
gagaaccaaaaggaaaagccgaaagaagaaagccacaggacaggga

SEQ ID NO: 238360 - RNA, 44 nt, Homo sapiens
ccgacgccaggcagcgcccccaaacggcccagcggcacccgcga

SEQ ID NO: 238361 - RNA, 56 nt, Homo sapiens
caccgccacgaggccgaaagccggaccccggggcccgggacaacggaagacaaggc

SEQ ID NO: 238362 - RNA, 70 nt, Homo sapiens
ccagaccacggagggagcggaaaccgacgcagacggccacagacaagagagccccaggccaaccacggac

SEQ ID NO: 238363 - RNA, 72 nt, Homo sapiens
gggccccggaggacgagaggggacgccacaaagaaggccaagaagacgacacaaaaggagcaccgagcggac

SEQ ID NO: 238364 - RNA, 69 nt, Homo sapiens
aagaaaacgggggcgccaccgggccgcgggggcagcacggaaaaaggggggggagccccccagcccacc

SEQ ID NO: 238365 - RNA, 79 nt, Homo sapiens
ggggagccgggcgagggacggccaaagggaagagcacgcacagcaacccgcaagagccccgccgaagaagacccaggac

SEQ ID NO: 238366 - RNA, 70 nt, Homo sapiens
gcccgcgcaccacggcggccgcgcccgcggcgcccgccccaggaacagggaggccaggcggcagcagcca

SEQ ID NO: 238367 - RNA, 76 nt, Homo sapiens
gcaggggaacaggcggaaacccaaccaagaaggcccaggcacccgaagagagacccagagaaggccgcaggcgccg

SEQ ID NO: 238368 - RNA, 67 nt, Homo sapiens
cccgggaccgcaggccccaagaaggggccagcagcccccccgagggcgcagcaacgaggggcccagg

SEQ ID NO: 238369 - RNA, 79 nt, Homo sapiens
ggggaagggcccgcaagccagggcaggaaaaaccaaggaacaccaaaaaaggagaacgggagccgcagaaaggcccagg

SEQ ID NO: 238370 - RNA, 69 nt, Homo sapiens
gcaagaggcaaggacgcacacagcaacacgacggagaccggacccccgcacaacccgcccgagacgaga

SEQ ID NO: 238371 - RNA, 75 nt, Homo sapiens
gaacggacgcgcaccgcaagaaaggccaagcacaaaacacacacagcaaaaaagacgcagacgcaacccgagcac

SEQ ID NO: 238372 - RNA, 76 nt, Homo sapiens
cacgccccccaccggacggccacagacgggacgggccgagaaccaaaagagcagaaggagcgagagaacagcacca

SEQ ID NO: 238373 - RNA, 72 nt, Homo sapiens
aagggacccaacacagaagaggcaagcggggaagcgccccagccaaagaaagaaccaagcccagaggagagc

SEQ ID NO: 238374 - RNA, 75 nt, Homo sapiens
gacagaccgcacaaacccggaaaggccggggagggcccgggcgaagccggccagaaggaggacaggaaaaagccg

SEQ ID NO: 238375 - RNA, 59 nt, Homo sapiens
ggagaggcccaggccgaccggcgcgcggagaaacgccaaggacccaggcgacccaacaa

SEQ ID NO: 238376 - RNA, 74 nt, Homo sapiens
ggaaaaggagaaaacaaggaagccaaaggccaaagccacccccaaaggcagaggaagaacgagcagggaaccaa

SEQ ID NO: 238377 - RNA, 89 nt, Homo sapiens
cagcccccaagagaccccgagggcccccgcaagagagcaccaagcccaggagaagaagcccaccaggaacggagaccccgaacaaggaa

SEQ ID NO: 238378 - RNA, 70 nt, Homo sapiens
agaaaacaaaaaacacaaagaagaaagccaggcccacaagggaacaggcaagggccaagacaagcccaga

SEQ ID NO: 238379 - RNA, 70 nt, Homo sapiens
gacccccggggaagccaccgcacagcgaccaggacagggacaagcgcacagcggagaaagcagcgcggcc

SEQ ID NO: 238380 - RNA, 82 nt, Homo sapiens
cgggccccccccaggaacggcccggggccgacccggcccgaggggaagcagccagggcacagacagcagagggggagcgacc

SEQ ID NO: 238381 - RNA, 74 nt, Homo sapiens
gccccccccccaccgcgggggcgcagagcgggcaaggcaaaagggaaagcaaggggaagggcccaagaagacac

SEQ ID NO: 238382 - RNA, 58 nt, Homo sapiens
caagcccggagaccagacgaaggagagaaggaaccggacgacgaacacaggcccgccg

SEQ ID NO: 238383 - RNA, 76 nt, Homo sapiens
ggcacgccacggcgccccgcaaggagcagggaacgagaagacccgagaaaaaacgcaccccggcaacggccagcaa

SEQ ID NO: 238384 - RNA, 90 nt, Homo sapiens
ggagagccggaagaggaggaagaagcagaagccgaaaccgccaaagccacccgggaagccaccgagagccgggaccagcgggcagacaca

SEQ ID NO: 238385 - RNA, 78 nt, Homo sapiens
cgcagagaacacacgggcaccaaacacagaagaagcagaacaaggaagagcaagcagcagaccaaaaaccacgggcgg

SEQ ID NO: 238386 - RNA, 76 nt, Homo sapiens
gcacaaggaccgaccgggcgagcgagagagagcaagcgcagcgccacaaacaggcccgccagcaagaggaaaagca

SEQ ID NO: 238387 - RNA, 73 nt, Homo sapiens
cgggcgccaggcccagcagcccagaaggacccagagggcgaaaagccaggagcaaaagacgagcgcgacgcca

SEQ ID NO: 238388 - RNA, 75 nt, Homo sapiens
acaacaaagaagaccacacacgggaaacacaaaacaaggagcagcgcagggaagcagcaacccagaagggagaag

SEQ ID NO: 238389 - RNA, 55 nt, Homo sapiens
accaggccagagccgacaagccccaacaaagcagaaacggcgaggaaagagagga

SEQ ID NO: 238390 - RNA, 37 nt, Homo sapiens
accgcgccgcagcgggcagagcacaaccccaagggcg

SEQ ID NO: 238391 - RNA, 77 nt, Homo sapiens
cccagcggcgccgagaaagagaccccaacaggcccgaccaacaaagaaacccaacagacggaaaccaccaaccaggc

SEQ ID NO: 238392 - RNA, 72 nt, Homo sapiens
gaagagcggaaagccgcccagagcccggaccaagcaccccaccaccaaaccacggagagacaaagcgaaaga

SEQ ID NO: 238393 - RNA, 49 nt, Homo sapiens
cggcagcaaagagggaacaggaaggaggcagaaagggagccccaagaga

SEQ ID NO: 238394 - RNA, 70 nt, Homo sapiens
cccagcaaaacaccggagaagccccggggaaagaggaggaaaacaaaggcagcgaacaaaccacaaagca

SEQ ID NO: 238395 - RNA, 71 nt, Homo sapiens
ccaagaaaaaaaccacaaagcggccgaaacagaaaacaagagaccacagaaggacgagaacccccgcgaac

SEQ ID NO: 238396 - RNA, 73 nt, Homo sapiens
ggggcgcgcccaggagcacgagaggacacaggaaacgccgacagggaaggaaggaacagagaagacccgcccc

SEQ ID NO: 238397 - RNA, 70 nt, Homo sapiens
aaagccgggaagacaaaggagcagaagcacaagcagaggaagggagccagcaaacgagggcaggaggaac

SEQ ID NO: 238398 - RNA, 80 nt, Homo sapiens
cccggccacccgagaagggagacgacgcgcgggccgcgagcggggcgacccgagacagaggcacaaaaggagaaagcaga

SEQ ID NO: 238399 - RNA, 68 nt, Homo sapiens
gcccacagccacaggaaaaggccagaaccaagcagagggacacaggcagggaccaacgcgggggacga

SEQ ID NO: 238400 - RNA, 75 nt, Homo sapiens
acgacgaagagacaaaggcaccggaaagccaggaaaaacacacgcgccacgggacacggaaccaggaggagcgga

SEQ ID NO: 238401 - RNA, 55 nt, Homo sapiens
cgaggcgaagagccccgggccggaagcaccgacgacccagcagcagaccgggcag

SEQ ID NO: 238402 - RNA, 74 nt, Homo sapiens
cgggaacaagaggggacagaaagggaagaggagagggaagaagggaaggaagagaggggcagaggagacccagg

SEQ ID NO: 238403 - RNA, 60 nt, Homo sapiens
cgggccagcagacaggaggaagacaaggcagcaccaagcacgaagaacaccagccagccg

SEQ ID NO: 238404 - RNA, 46 nt, Homo sapiens
gccccccgcgcgcccgggaacgagaccagaacagcaggaacaggaa

SEQ ID NO: 238405 - RNA, 87 nt, Homo sapiens
gggagagaagagccgcagcccgagcccagaaggcggcgaccgggcgcgggcaaggcgcaccaagaaggcggagaggaaagagaggga

SEQ ID NO: 238406 - RNA, 73 nt, Homo sapiens
cagccaccgaggccaacaacacaggcagaagagggggacccgaacccccgggccggaggacccagccggccgg

SEQ ID NO: 238407 - RNA, 70 nt, Homo sapiens
gcggcacgaggcaggcgacgcgagaaggccaggcccagacagccgccgaagaaaagcccagggagccccc

SEQ ID NO: 238408 - RNA, 77 nt, Homo sapiens
gccggccgcggcagccggaccagcaggacagggagaccaccggacccccaggaggggccaggccggccggggaaccc

SEQ ID NO: 238409 - RNA, 66 nt, Homo sapiens
ccggcccaccgcaccgggacccaagccagcaacacaagggcaacacgggaaaccaaccccacaaac

SEQ ID NO: 238410 - RNA, 63 nt, Homo sapiens
cggacgggggcaagcggaagggagcccaagaggaccagcgaacggaggaaccacgcacagagg

SEQ ID NO: 238411 - RNA, 68 nt, Homo sapiens
cagccagcacacacgaaagacagaccagggcaaagcaccccagagcaaaaaacggggagaacaaagaa

SEQ ID NO: 238412 - RNA, 83 nt, Homo sapiens
aggggacggcaggagggaaggagaagcccaacaaagccccacagcagccagaaggaaaggcaaaccgacaccagcgacacaag

SEQ ID NO: 238413 - RNA, 92 nt, Homo sapiens
gcaaggaaaagagcccggaaagaagcaacagagaggggagaacccacaggcgacaacaaaggagaggacaagcgggccaacacaagggagag

SEQ ID NO: 238414 - RNA, 65 nt, Homo sapiens
ccgcgccggcccccgcggagagaccaggaggaggagaggaggagggaggggagacgggacacagc

SEQ ID NO: 238415 - RNA, 79 nt, Homo sapiens
ggggccgcagccaaggaaggaggccgcaaacagacaggaagaggaagcgccccgcgacagcccccaggaagcgagaccg

SEQ ID NO: 238416 - RNA, 34 nt, Homo sapiens
aacgcacccaacacgagagggagcacagcgcgga

SEQ ID NO: 238417 - RNA, 70 nt, Homo sapiens
cccacacccccaagaaaggagagaagaccccccaaaaaaggggggaacggagccaaaaggaaaagcgaag

SEQ ID NO: 238418 - RNA, 79 nt, Homo sapiens
gcaagcgaagccgaaaaagcgcccgagacgggcccgccgaaagaccaaaccgcacaaacaaagccaaggaacaaagaag

SEQ ID NO: 238419 - RNA, 86 nt, Homo sapiens
agccaccagaccacgaggacacaggcaccacagcgggaggcgagacccgaggagcaggagagaaaaacaggccaggaagagcacca

SEQ ID NO: 238420 - RNA, 68 nt, Homo sapiens
ggagaaacacaggaacaaacgacagacgacaggaggcacgagacgacaaggagaggccagcggaagcc

SEQ ID NO: 238421 - RNA, 60 nt, Homo sapiens
gccccggcacaacagcaacgcaagggcaggcggccagcagcagcagagcaggcagggcag

SEQ ID NO: 238422 - RNA, 81 nt, Homo sapiens
gaacaacagcacgggagaaagcgcccacgcacgaaagcccaggccaaaaagagaagcgcacacaacagaagagaagcaaaa

SEQ ID NO: 238423 - RNA, 58 nt, Homo sapiens
cacacaacggccgaccgaccccaaaagagacagacaggcgagcaaaaaaaacaagccc

SEQ ID NO: 238424 - RNA, 74 nt, Homo sapiens
aaagcgcagcgagcggagccgccggagaaccaaaggcaagaaccggagcaggagaaaagccggaaagaaaacgc

SEQ ID NO: 238425 - RNA, 68 nt, Homo sapiens
aggccgaaaagacagagaggggaaaccccgaaaggggggcagggagagaagagggaacaggcacgccc

SEQ ID NO: 238426 - RNA, 41 nt, Homo sapiens
cacccggagcgcaccacaaccgaaaagcaacggcgcaagag

SEQ ID NO: 238427 - RNA, 102 nt, Homo sapiens
caccaaaggaggaaacaccaccagaaaagggagcccaccacgaaagcagcaacagccagccgcagacagccagaaaccccggcacacgcggaggagagccac

SEQ ID NO: 238428 - RNA, 72 nt, Homo sapiens
aggagaagcgaacaaaaaaaaccccaaagaacccgacggccgccgacggcccgcacagggagggcacagcaa

SEQ ID NO: 238429 - RNA, 70 nt, Homo sapiens
gaggcgggcgcggagaagcgcggaggggaagacggaacacacggggaagcgcgagcgcgagaccggggca

SEQ ID NO: 238430 - RNA, 71 nt, Homo sapiens
acgacccggagcacccgaccccgagccagggggcagaacagggaagccgacagcaaggcggaaaagaagca

SEQ ID NO: 238431 - RNA, 59 nt, Homo sapiens
gccgggcaccacggggaccggagacaggggcacgcacggggacgggcggggccacccgg

SEQ ID NO: 238432 - RNA, 83 nt, Homo sapiens
ggagccggggaagaggcgcccgggacaggacccgcaggaccacgacggcgcggggaagaccaagacacccaggagaaagacag

SEQ ID NO: 238433 - RNA, 74 nt, Homo sapiens
aggagcacggggggggccagggagcccggaaggaacgacacgaaagaagagacaacagagaaaaacaagaccac

SEQ ID NO: 238434 - RNA, 38 nt, Homo sapiens
aaaagaagaagcaacgacaaaccaaccacgcggcggac

SEQ ID NO: 238435 - RNA, 78 nt, Homo sapiens
gcaagcgcagagccaaacagccaggcaggccgcacacaaggcgacggcccggagccacacgacgcgccaagaagcgca

SEQ ID NO: 238436 - RNA, 72 nt, Homo sapiens
gcagggaccccccaacagaggaacgaggaaacagaaagaagaccaagcacagagggcggaaaccgcggcgca

SEQ ID NO: 238437 - RNA, 77 nt, Homo sapiens
ccggagccacccaaagccagcaggccggacaagacgcagagagccgacagaccccgaagggacagggaaagagcgaa

SEQ ID NO: 238438 - RNA, 68 nt, Homo sapiens
cccggcgccggccgagaaggcagaggcggagaagccgcgggagcggaagacaggcccggagcccgacg

SEQ ID NO: 238439 - RNA, 63 nt, Homo sapiens
gaacagcagcgccgcccgccgacagccaggcccgggagaagacccaaagacaggaccacgcac

SEQ ID NO: 238440 - RNA, 66 nt, Homo sapiens
agacaagcagaaaaagacggccaaccaaccaggacaagcgagccagcagggaaaccccccggcccc

SEQ ID NO: 238441 - RNA, 61 nt, Homo sapiens
gagagagcggaagagcggaaaaggcccgggaaaaaaaaggagaaacaaccaaaacgaagaa

SEQ ID NO: 238442 - RNA, 56 nt, Homo sapiens
cgacggcgagcccgggccgcgcccgaggcagaggacagggagaaggagagcgagcg

SEQ ID NO: 238443 - RNA, 81 nt, Homo sapiens
cgacggcaggcgcacggaacagcgaggccagcaggagacggagccacggagcagaccaaaccgcacaaacaaagccaagga

SEQ ID NO: 238444 - RNA, 71 nt, Homo sapiens
gaaagcagcaaaaacagagaaacacgaagaaggcaaccaccccccaagacaaggagaaggaccaagaacca

SEQ ID NO: 238445 - RNA, 59 nt, Homo sapiens
gccccacgggaccaagacacccgcgagagagccaagccccgccgggcgcggagaggccg

SEQ ID NO: 238446 - RNA, 78 nt, Homo sapiens
gcacccgcgacccagaagaacccacaggagggccagaggacaaagcacggcggaagagaagccagccgccggcgacag

SEQ ID NO: 238447 - RNA, 65 nt, Homo sapiens
aagaccgaacgaaacgcaagggcggcccagggagcagacaaccaccacagagaagcaggcgacca

SEQ ID NO: 238448 - RNA, 87 nt, Homo sapiens
gcaagcacaaagcgaaaaaagaggaagggaggcggagagcaaaaccgggagcacggagaagaagggaccccaggcagagacggagcc

SEQ ID NO: 238449 - RNA, 82 nt, Homo sapiens
gcggccgcggacggagccgggcgcggcgcacgccgcccgcccagaaaccgggagaagccggccaggcaggcacaccccacca

SEQ ID NO: 238450 - RNA, 38 nt, Homo sapiens
caccgccagccacacaaaaaacgagaccgcgcacagaa

SEQ ID NO: 238451 - RNA, 82 nt, Homo sapiens
gaggcgcggcaggagggagcaggagcggaccggcccggaaggggccacaacacggacaccagccgaaagccggaaagcggcc

SEQ ID NO: 238452 - RNA, 68 nt, Homo sapiens
ccgaccgagcccaggagcgccacgcgcggaaggcagcgcccagcagcgcagggcaaaggagcaagaaa

SEQ ID NO: 238453 - RNA, 41 nt, Homo sapiens
cccgcccgcagcgcccaagcaacggagccgccgcacccagg

SEQ ID NO: 238454 - RNA, 77 nt, Homo sapiens
gcaggcacaggaagcgggacggcgagaacggaggcagcacggcaggagacgaggagaggacagcaggacacccggac

SEQ ID NO: 238455 - RNA, 71 nt, Homo sapiens
ccccgcaacgaagcggccccagcccgaaagcaaccgggcgcaggccacaggcccggcggacagaagacacc

SEQ ID NO: 238456 - RNA, 83 nt, Homo sapiens
cgcaaccgcgcccgccggcccccccccgcgcccgcgaccgccgcggcgaagagggggcacaaagagcgacagagagaaccaca

SEQ ID NO: 238457 - RNA, 75 nt, Homo sapiens
agacgacaagcacacacaggcgcgaaacggaaaaaggcggcaccaggacgccgaaaagcgaccggacgcaggcac

SEQ ID NO: 238458 - RNA, 67 nt, Homo sapiens
ggagacagacgcagggcgcccccgaagcggaaacacaaccgccacgaccaaagacaccaaagaaagg

SEQ ID NO: 238459 - RNA, 82 nt, Homo sapiens
gggcccaacaacggagaaaccccccaccagaaggcgaacagcgcggagaacacaaggaagaaaagaaagcaagacaggcaag

SEQ ID NO: 238460 - RNA, 73 nt, Homo sapiens
gacggcacgagaacgggacccggccagaggaaagaacccgagggagaccagcacgagccgggcgggacgccgg

SEQ ID NO: 238461 - RNA, 63 nt, Homo sapiens
ccaccaaaccggcccggcgcaggccccccagcccggcgccccgcccacacgcaagcgagcccg

SEQ ID NO: 238462 - RNA, 80 nt, Homo sapiens
gcgcaagcccagcgggacaggagccccggcacaaaggaagaagaaagaagggagcaagagcaaaaaagaagaggagagga

SEQ ID NO: 238463 - RNA, 79 nt, Homo sapiens
agcccgcccggcgccccggcggccgacagggagccaccacgcccacacgggagcagcgggcaacccacgaccagagggc

SEQ ID NO: 238464 - RNA, 79 nt, Homo sapiens
gccgaggacccagcacaccgagggcacacacccacgcggggcgcgcagagcgggcccgggcgcacggggccaccaggaa

SEQ ID NO: 238465 - RNA, 90 nt, Homo sapiens
aaaacccgacccaaccagccaaggacccacgggcggacagcccgggcagaaagcagacacgggagcaaagacacgaggaagcgaggccga

SEQ ID NO: 238466 - RNA, 83 nt, Homo sapiens
ccaggaaggagacacggccccccaaggaaaacagggaagaaggagaaagggccaaccccgaagaagcaaacagaaacgaagga

SEQ ID NO: 238467 - RNA, 71 nt, Homo sapiens
aggcaacgaaacagccacgcccaaaccaaacgaacagggcaggacacaaccagacaacgagcacaaagcag

SEQ ID NO: 238468 - RNA, 90 nt, Homo sapiens
aaaacaagccaggaaggaaaggacggaagcaccaaaagaccacaaaacaaaccacccaacacaagcaaagaccacgaagccggaaaagaa

SEQ ID NO: 238469 - RNA, 88 nt, Homo sapiens
cccgcgaccccgagcgggacgacgcagcaagaagagacacccgccgagcacagacaggccggacaggggccacaccggaacccagaac

SEQ ID NO: 238470 - RNA, 71 nt, Homo sapiens
acccgaacgggggacaaggagaacaccagaagcagccgaaacgaaccaagaaccgaaggaaccaagaggaa

SEQ ID NO: 238471 - RNA, 67 nt, Homo sapiens
gccgagaagcggggcaccacgaaggaccgaagagaaaaaagacccacaggcgaagaacaaaagcgaa

SEQ ID NO: 238472 - RNA, 68 nt, Homo sapiens
aaggaccaagagaacaagggaaccagccaaaagcagcaacacgcaaccccccgacccccaaaaaggcc

SEQ ID NO: 238473 - RNA, 80 nt, Homo sapiens
cacccccagcaccaccccagccccgcgcccggaacaagacaggcagaaaagagaccaaaagaccggaagcgaaagaaaaa

SEQ ID NO: 238474 - RNA, 64 nt, Homo sapiens
ccgggaggagggacaaagcaaggaggaggcagggccagcgcggcaaaaccaaggccagaaacgc

SEQ ID NO: 238475 - RNA, 89 nt, Homo sapiens
gagaacacacggagaagagccccaagagagcaaacagacggcaaggaaacgaaacaggaagagggaccggaggcgcaacgcgcagcccc

SEQ ID NO: 238476 - RNA, 51 nt, Homo sapiens
aaaaaggggccaagaaccgcaagaagccaggaccaaagcccacgaaacccc

SEQ ID NO: 238477 - RNA, 115 nt, Homo sapiens
ccgaccgagaacaagcccagaccgcgggggccagacagcaccggcaagaccacccacagcaaggaagcgcacagggaggaagcggaagacagagagagacagagcccggacggac

SEQ ID NO: 238478 - RNA, 35 nt, Homo sapiens
gggagaagaaaagacacagcccggagaccgggcac

SEQ ID NO: 238479 - RNA, 51 nt, Homo sapiens
ccggggcgagcaccgcgaaggagcaagcagacagagaaagacgaccgccaa

SEQ ID NO: 238480 - RNA, 109 nt, Homo sapiens
ccggcaggccaagcaacaagccccgcccccccgcacccggggcccgaaaccacagacaagggaggcgaggacggacaaaaggaaacggacgggaggccagccagcagaa

SEQ ID NO: 238481 - RNA, 65 nt, Homo sapiens
caaaaggcaggagaagcaagacagccgagaacaaacccagcaacaggaagagacgccaccaacgc

SEQ ID NO: 238482 - RNA, 80 nt, Homo sapiens
cccggcccccagcgccgcggggcccaccagggaggaagaggcaggcgcagcagagagagcagagccacacgcggacaaag

SEQ ID NO: 238483 - RNA, 80 nt, Homo sapiens
gccggcggccgcgaagagagaagaggcgcgacggaccagagcagggaacagggaaaagacgcgaagaagagaaagaaggg

SEQ ID NO: 238484 - RNA, 69 nt, Homo sapiens
gccgccgggccgcgcccacgggcagcgaggacacacaagcagagcacaaacccaccagaagggacgcag

SEQ ID NO: 238485 - RNA, 71 nt, Homo sapiens
acacgggagagaggccgggcgagcagcaggagcaccggcccaagaaacaggcgaacgcagcacaggggacc

SEQ ID NO: 238486 - RNA, 79 nt, Homo sapiens
gcggccgccgaggccggcaaacgcagaaggggaagaaccgggccaaccggggaaaagcggaggcaaagaagaaccacgg

SEQ ID NO: 238487 - RNA, 39 nt, Homo sapiens
acaacggggcccgccgagggcgggacccgagagaacgca

SEQ ID NO: 238488 - RNA, 54 nt, Homo sapiens
cgagaaggggggccaccccaacgccagaggcagccaccagcaggaggaaaacca

SEQ ID NO: 238489 - RNA, 73 nt, Homo sapiens
acaggcggcgcgcgcggcgcgggacgcgcgcgggcacccacggagccccggggcgagcgccacagcagccaaa

SEQ ID NO: 238490 - RNA, 86 nt, Homo sapiens
gcagggacaaggaccagaagaaacgcaccggaaaggccaccagaccgaggaggagaaggggcggcccggaggccgagaggagcgga

SEQ ID NO: 238491 - RNA, 79 nt, Homo sapiens
acccagacacccgggccagcacaaacccagaaaccagacggacgcagcaggaaaaaaccaggaacgccccaaaccagga

SEQ ID NO: 238492 - RNA, 72 nt, Homo sapiens
ggagacggcagcagcccgcaggagggacggcaaggaagaaagcacgggaaaaggccgggcccacaggggaga

SEQ ID NO: 238493 - RNA, 112 nt, Homo sapiens
ccggagcggggcgcggaggcgcgggaccgcggggagcgcggggacccggagccgcgagggacgaccgggaacacgggccggagacgaccgggagagggagagcagggaaacg

SEQ ID NO: 238494 - RNA, 65 nt, Homo sapiens
aggaacaggcagggccaggaacaaccgagaaacgaacggaaggaaacagaaaccacggcgacaac

SEQ ID NO: 238495 - RNA, 74 nt, Homo sapiens
cggaagaggccagcccagccgggggccggaggcagggcggagggacagcaaacgggcaacggaacacagcggaa

SEQ ID NO: 238496 - RNA, 76 nt, Homo sapiens
aaccagggccacagcacgcagccccaggcagggaacacacggccggaacgccgccaaagggaggcggagaagcggc

SEQ ID NO: 238497 - RNA, 60 nt, Homo sapiens
ggagacacaccccaccagggcaacaggacacaaggcagcgcgcaggaacagccgcgcgac

SEQ ID NO: 238498 - RNA, 77 nt, Homo sapiens
agacacagagcgaaacagcaacaaaaggacgaagggggaagaaacccaagcccggcgcagaccacgagccagacacc

SEQ ID NO: 238499 - RNA, 69 nt, Homo sapiens
caccgcaagcagacaagggacagacacaaaaaccccgcggaaacgccagagaaagcggcgcgagcggag

SEQ ID NO: 238500 - RNA, 68 nt, Homo sapiens
gggggaagccaggcaccccccacagaaagggcggccgcccaggagcgaggggagggacaggagccgag

SEQ ID NO: 238501 - RNA, 77 nt, Homo sapiens
ggagacgccggccgccagggaccagcccagaacaaaccgcgccgggagcgagaacccgagcagcgccagagcaacac

SEQ ID NO: 238502 - RNA, 56 nt, Homo sapiens
cgacgaccacaaaaccggaccccccgcccaccccagacaagaggaaaagggagaac

SEQ ID NO: 238503 - RNA, 104 nt, Homo sapiens
cccacgggagagagagaaagcagagccccaaaccccccaaaaccacccggggacgaaggggaggagaggagggaaacacccgaagaaagaagaaacaaaagaaa

SEQ ID NO: 238504 - RNA, 60 nt, Homo sapiens
gccaccgaacagcgcggaggcaccagcgaaacaagccaggaagacagggggcggggcggg

SEQ ID NO: 238505 - RNA, 85 nt, Homo sapiens
cgcgaagcggccaaagccgcccagacggccaccggcgggaggaacaaaagagaagaaggaggagaaacaagagcaccaccagaag

SEQ ID NO: 238506 - RNA, 80 nt, Homo sapiens
gcggcagcggggcggcgcgcggcgcggcggcggcccgccccgcggcccagccggcacagccacaccgagaagaccggccc

SEQ ID NO: 238507 - RNA, 109 nt, Homo sapiens
ccggcgacggaccagcgacccaagcgccgcggaaccacgccgccacgacccccagcaggagagagccaaaacgacaggccagggaagaaaacaagaaggccaaagaagg

SEQ ID NO: 238508 - RNA, 54 nt, Homo sapiens
cacaagagcaccaacgaggcgagacgacgggaccgaaggaccccgccagagaca

SEQ ID NO: 238509 - RNA, 81 nt, Homo sapiens
gcgccggccggcccgcggcgcggacgccggcgcgggagagaaagcggaccaggacccccagcacgaaggaagccgagaacc

SEQ ID NO: 238510 - RNA, 68 nt, Homo sapiens
acaagacagccagaggccggacccagcagggcccccggaacaaacccgggagccacgccagaccaaag

SEQ ID NO: 238511 - RNA, 92 nt, Homo sapiens
ccgaccgcagggagcagaggggacagaggcaccaaggaccccaagacagggcggagaacggaaaagcaccaggaagcagagaggaccgcaga

SEQ ID NO: 238512 - RNA, 79 nt, Homo sapiens
cgcaagggcagcagaacaggggcaaagggaaacaaaaacaacgggaggcggaacacgcaccggacaagccaacgaagac

SEQ ID NO: 238513 - RNA, 60 nt, Homo sapiens
acacaccaggcagccgcaaggccgaccaaagcaacaaggaaccccagaaccagaaccaga

SEQ ID NO: 238514 - RNA, 81 nt, Homo sapiens
gaacgcaggggagaggagaagagagcggcggaaggggcacaaggaagccacgaggagcaggagaaccagcgcgcgacgcaa

SEQ ID NO: 238515 - RNA, 77 nt, Homo sapiens
acaccccaaggcagccaggggaaaccaccagccggggacaagcgaagccagcaagggcagaaaccaaacgcccaaaa

SEQ ID NO: 238516 - RNA, 57 nt, Homo sapiens
cggaccaaaaggggaggagaccgggcgaggggggacagggcagaccgccagcagcac

SEQ ID NO: 238517 - RNA, 64 nt, Homo sapiens
acgacgaagcagcgcagaaggagaccaaaaggagaaaaccggaagagaaaggccgggaagcagg

SEQ ID NO: 238518 - RNA, 54 nt, Homo sapiens
ggaaaggccagccaccagcaggagcacgggaggacagaacaaagggcaaaggac

SEQ ID NO: 238519 - RNA, 72 nt, Homo sapiens
caacggccgccgcagaggcaccaccaggagcagaagaacggcgccacaaagaaaggcaagcagggcgagaga

SEQ ID NO: 238520 - RNA, 35 nt, Homo sapiens
aacacgccccacgaaagacccccaggcaaaccgcc

SEQ ID NO: 238521 - RNA, 68 nt, Homo sapiens
ggccggcccgggcccagcaggagcccaagcaaggccagagaaccaggcagagcccagcccggaccgac

SEQ ID NO: 238522 - RNA, 82 nt, Homo sapiens
ggcaagagcagccaggaaccgccaggaaggccagcggcgcacggacgcccgccaagcccgggaggaacgcgccccaccaccc

SEQ ID NO: 238523 - RNA, 79 nt, Homo sapiens
aaccacccaggaaacagcgcaaggcccccgcagccaccaggccaccggaggcgcccaaggaggaaaacaaggaaaaaaa

SEQ ID NO: 238524 - RNA, 68 nt, Homo sapiens
ggcgccgcgccccggcgcggaacccgcccagcggccgaggagaagcgagccccgacccaacggaaccg

SEQ ID NO: 238525 - RNA, 74 nt, Homo sapiens
ccgggaagagaagaacagacaaggaaaaacaccaaggaggagcagggaaagaccaccccagaacaggcccaagg

SEQ ID NO: 238526 - RNA, 68 nt, Homo sapiens
gggacaaaacagaggcaacaaggcgcggacgcagacagacccgacaaagacgcacaacggccaaagcg

SEQ ID NO: 238527 - RNA, 73 nt, Homo sapiens
gggcacggcgcgcgggagggcagagccagaaggagagccaagcgccagagaacaggaggaggcaggcgcggga

SEQ ID NO: 238528 - RNA, 104 nt, Homo sapiens
gcagaggggccacgcgggcccgaggcgcaccaagggcgaaggagccggcccaagggcaccgcgccggcgcagcgccggcccccaagaggagacgggaggggggc

SEQ ID NO: 238529 - RNA, 74 nt, Homo sapiens
ccccaaaagcaagaacaaggaggagaacaggagaggccagcacaaagcgagaaggagggagaagggcgcgagaa

SEQ ID NO: 238530 - RNA, 66 nt, Homo sapiens
ccaaaaaggcacgagggaacgggaaagaacagagaaggagggagaacgagaggaaccaagagagaa

SEQ ID NO: 238531 - RNA, 49 nt, Homo sapiens
agacacacaaaaacaccgaacggcaacgaaaagagacacgacgcaaacc

SEQ ID NO: 238532 - RNA, 106 nt, Homo sapiens
cgaagcagcacgcagcacaaagacaaaaagaccaggagagaaacccgcgaaaaaggaacgaaccccagcaaaacagaagaaggcaaggaacaagacacgaaagagg

SEQ ID NO: 238533 - RNA, 64 nt, Homo sapiens
agagagcaaagaacccccaagcaggaagaggcggacacgagcgaaccgaaaagagacacggagg

SEQ ID NO: 238534 - RNA, 78 nt, Homo sapiens
ccgcagaggccccgcaacggggacagggcggaaacaagccaaaaccaggagaacaagagcaggaacgaacagagagcc

SEQ ID NO: 238535 - RNA, 74 nt, Homo sapiens
acaggcacccaggcccacagagaacaaggagccagaggagggaagacaaagaggaaccagacaaaaccgcaccg

SEQ ID NO: 238536 - RNA, 72 nt, Homo sapiens
gacgggcgccgccccgcgcggcaggagaggagcaaaaaaggaacaagacagaaaaacaacgaccaaaaacac

SEQ ID NO: 238537 - RNA, 60 nt, Homo sapiens
aagaaccgacccacaccaaggcccaggagaagaaggaccagcccacaacccccgacaagg

SEQ ID NO: 238538 - RNA, 80 nt, Homo sapiens
gcgagggcccagaaagccggaaaccacgggcaaaacagaagcagacgagaacggcagccaaggggaacgaagaaggacag

SEQ ID NO: 238539 - RNA, 71 nt, Homo sapiens
gcgaagcgaacaaaaagcagcaaaccggaccaccccgaagaaagcacagggaagggacgcgaagaacccca

SEQ ID NO: 238540 - RNA, 76 nt, Homo sapiens
aaggacgccaagggggcgagagggacaggcccaggagggcggggccacccaggaggagggcagcacggaccgccag

SEQ ID NO: 238541 - RNA, 83 nt, Homo sapiens
agaggccagcccaagcggcccaccccggcccggaaggagcagcaccacaggacccagacaggagcgcgggaagaagccggccc

SEQ ID NO: 238542 - RNA, 89 nt, Homo sapiens
cgagacaagaaggaaaaagagaagaccagaccaaggcagcggcagagaggcgagacacggaacggcgaagaagcgcacgggcccggcgc

SEQ ID NO: 238543 - RNA, 85 nt, Homo sapiens
cgccagcagcagaaggccaccagccccaggcgcacagggcccggcagccgccagcagaagcgccaggaaggcggggaagagaaag

SEQ ID NO: 238544 - RNA, 71 nt, Homo sapiens
agaagacagccccaagggcagacgcgccaccagaagcagaaagagcgaaagaagagggcagaacccgacaa

SEQ ID NO: 238545 - RNA, 69 nt, Homo sapiens
ggacgaaaagaaaccacagagaagaaccacaggaccaggcggcgaaccggcacccaagcgaccgccgga

SEQ ID NO: 238546 - RNA, 37 nt, Homo sapiens
aaccagccaggcccaagacaacgaagagaggaaagaa

SEQ ID NO: 238547 - RNA, 70 nt, Homo sapiens
cacacccgaagacgacgggaaggacgccagaaaacaccccgaagccccagggcccgaaacacgcaagagc

SEQ ID NO: 238548 - RNA, 86 nt, Homo sapiens
cgggaccggccaagggcccacacaccaagaccaaggccgcaggacaagcgaacaagagggacaaagagggacagccgacccccaga

SEQ ID NO: 238549 - RNA, 55 nt, Homo sapiens
ggccccccagccagggaacagggagaccaaccgaaggacaagggaaggagcagag

SEQ ID NO: 238550 - RNA, 63 nt, Homo sapiens
ggagcagacccccagccggcgagacagaacagaaggagcggcggacacacagacccccaccaa

SEQ ID NO: 238551 - RNA, 83 nt, Homo sapiens
gcagcagcggcccggcagcggagcacgaggcgggcagcagcagccccggggcccggagagccacaagaacggaagcagaagca

SEQ ID NO: 238552 - RNA, 64 nt, Homo sapiens
agggcgcccccgaccccgaggcgcgccccagccagccccgccagcaggggaacaggagcgccgc

SEQ ID NO: 238553 - RNA, 37 nt, Homo sapiens
gcaccacaaaaaggacaggagacagggaaacgaaaac

SEQ ID NO: 238554 - RNA, 51 nt, Homo sapiens
agagcgccgagccagacccaggaagaaggcgccgagccggacgacgaagcc

SEQ ID NO: 238555 - RNA, 67 nt, Homo sapiens
ggagcggcgagggaaaagcgaggcaaggcaggcggcagcagccgcccaaaacacaaaccaaagaaga

SEQ ID NO: 238556 - RNA, 101 nt, Homo sapiens
aacggcgacggggaaggaagcaacaacaggcagccaccgagagcacaaaggggggagcaggccccccgaacgaggaaaaggagccaaccaaagacacagca

SEQ ID NO: 238557 - RNA, 57 nt, Homo sapiens
cggccgagaggccggcgcacggggaaggagccagggaacacacaagaagacaacccc

SEQ ID NO: 238558 - RNA, 56 nt, Homo sapiens
gacgagacaagacggggaccgagagaagggacggcccccggcccccggccgcggga

SEQ ID NO: 238559 - RNA, 70 nt, Homo sapiens
caggcaccacaaacaacaaccgacaccgcagaaccagcaggagcagaaaagcgaggcaagggcggcaggg

SEQ ID NO: 238560 - RNA, 72 nt, Homo sapiens
cgggccacaacaaaaaggccaagcccaagcggaagccacacgggggaagaagacaccacgccacccaagaga

SEQ ID NO: 238561 - RNA, 87 nt, Homo sapiens
cgcggagcgcagcaggacgacgcggccggcgcggcagacggccacggccgggcgaggagagagaacaagaacacagaaaaacccaaa

SEQ ID NO: 238562 - RNA, 83 nt, Homo sapiens
gcgcgcacccccggggagagcgacgaggacgagacgcagaccacagcgacgaggacgacgccaggaacagcgcccccgggccc

SEQ ID NO: 238563 - RNA, 54 nt, Homo sapiens
ccggcaagcgacggcagccagaccacaccccaggccgaaggagcgcgagccaca

SEQ ID NO: 238564 - RNA, 77 nt, Homo sapiens
agcaccgccgcacagacccaacagacgcagaaagaggcagagcgggccgaacgggccaaggagcgggagaagcggcg

SEQ ID NO: 238565 - RNA, 31 nt, Homo sapiens
cgaagagaccgaaccggaaacgaaacagcgc

SEQ ID NO: 238566 - RNA, 64 nt, Homo sapiens
gcacggcagcacaagacgccgccccagcggacacaaaccaggaggcccaacagcaggccgaggc

SEQ ID NO: 238567 - RNA, 75 nt, Homo sapiens
gaagaccgccgagaacccaagggggagacaggaagccaccgacaagagcacagggaaggggaagacgcagcccac

SEQ ID NO: 238568 - RNA, 55 nt, Homo sapiens
aacagacacgcgagccaagggagacaacaagaaacaggagaagggaggccgaaaa

SEQ ID NO: 238569 - RNA, 51 nt, Homo sapiens
aggccccgggcggaccaggcccaggaacagggagagaaggcagaaaaagac

SEQ ID NO: 238570 - RNA, 74 nt, Homo sapiens
agaaagacaaaagccacccaggccggccagcacccaccgagaaggccagcaggagacccccaagccccgcaagc

SEQ ID NO: 238571 - RNA, 80 nt, Homo sapiens
gccccaaaaacagacagcaaaacaaagaccagccagcaacccacagaaggaggaagacccccaagagcagagcccacaaa

SEQ ID NO: 238572 - RNA, 76 nt, Homo sapiens
cccacaagaccccccgccaagccagacgagccccgggcaccgcgcgcgcccgaggcgcgcagaagccagagggcgc

SEQ ID NO: 238573 - RNA, 86 nt, Homo sapiens
gcagggcaccgcgcgaagcggccaaagccgcccagacggccaccggcgggaggaacaaaagcaggaggccacgcgcagccccggaa

SEQ ID NO: 238574 - RNA, 77 nt, Homo sapiens
cgccgccccgccgccacccgaccgcagagaccgggaggcagcaacccagaggccaccgccaagcaaaacaaaacccc

SEQ ID NO: 238575 - RNA, 81 nt, Homo sapiens
gacggccagacaccggaagccggaaaaggcgcccggccggaaggccccacccggagagagcagcacggcggcagccacacc

SEQ ID NO: 238576 - RNA, 72 nt, Homo sapiens
gccaggcaaagcggacccaacacaaaggcccagcacgcacgccaagacgagggacgccaaaccaccggccag

SEQ ID NO: 238577 - RNA, 82 nt, Homo sapiens
cacacaacgagacccacaagaccgggcaaacccggcaggggcgcagagcccagcccgacccgcgcggggacgaggccgcggc

SEQ ID NO: 238578 - RNA, 72 nt, Homo sapiens
ccgcagccgagcggggccggccacaggggaagaacacaaggcacacaaagccacccaaaagcacccacaacg

SEQ ID NO: 238579 - RNA, 94 nt, Homo sapiens
ccgagacaccgcccgcccgagaacaccaggagacacaagcggaaggccaaagacagacgggcccagcacacagggacaacgccaggggcacacg

SEQ ID NO: 238580 - RNA, 64 nt, Homo sapiens
acaaggacccccagagcaagagcgcacaagccccgggacacagacggaagggagggccacccac

SEQ ID NO: 238581 - RNA, 78 nt, Homo sapiens
ggagccgggccgggcagcagcagggcgccggaagccagaggacaacagagcaaccagccgggcaccaggaaccccagg

SEQ ID NO: 238582 - RNA, 80 nt, Homo sapiens
acggagaggagcagcccccggagacagcggcacagagggccgccaggcaaggggcgcaccgggaaaggaacaggagcgcc

SEQ ID NO: 238583 - RNA, 76 nt, Homo sapiens
aacaggcgccgccggaagacaggcagccggcacccgcacaacccagggggccgaacccagaccaacaaaaggaccc

SEQ ID NO: 238584 - RNA, 81 nt, Homo sapiens
ggacacagcaagaaccccaaggacaagaggcagcggcggcgagagcagaccgaggaccagcgaacaccccccagccacggc

SEQ ID NO: 238585 - RNA, 70 nt, Homo sapiens
aagaggcggccaaggggacgagcaaaggaagcgcgaacagcagcgcaggaaggcggccccgcagcagagg

SEQ ID NO: 238586 - RNA, 123 nt, Homo sapiens
accggccaaacagcccggacggggagggagccccaagccaccagcccccccaagcaggagggcggaagggaggaccggcggcgggcggcgcccagcaggccggagccgcagggcccgcaagcc

SEQ ID NO: 238587 - RNA, 69 nt, Homo sapiens
aagaacagaggacgccaagagcggcaaaggaagcgaagccagagcaggggagcggaaagggcccaccac

SEQ ID NO: 238588 - RNA, 57 nt, Homo sapiens
acagcaggagggggccacggccaagaaacaagggaagccgggcggaccaggagaggg

SEQ ID NO: 238589 - RNA, 81 nt, Homo sapiens
ggccgacaggcggcagcggggcggcgcgcggcgcggcggcggcccgccccgcggcccagggggcccgaaggcaccgcagaa

SEQ ID NO: 238590 - RNA, 77 nt, Homo sapiens
aaagagccgggaagcgaaaggaccccggacccagcgaccaacgccccgcagggcggccggcggaacaaccccccaga

SEQ ID NO: 238591 - RNA, 70 nt, Homo sapiens
gaaaccaccacccgacaaaccaaaaggagagcaagcgccagcacccaagagaggcgaagaggagaggaag

SEQ ID NO: 238592 - RNA, 64 nt, Homo sapiens
caaaggagaccggccacagacgacaagagacagagcagaaaccaagaagccaagggaaccgcaa

SEQ ID NO: 238593 - RNA, 66 nt, Homo sapiens
cagcgcacggcccccccagcaccagggaccaggaagcgagaagacaaagcgaagagagaagcagag

SEQ ID NO: 238594 - RNA, 78 nt, Homo sapiens
gaagaagaaagcagggggacgcaaaggccaaggggcggcaaaaagcggaagccgcagaaggaccggccagaagcaagc

SEQ ID NO: 238595 - RNA, 60 nt, Homo sapiens
aggagccccccggccccacccaaaaggagcccgaaaagcagggggaccaacacgacccag

SEQ ID NO: 238596 - RNA, 73 nt, Homo sapiens
ggccagagccagccacacggccggggacggagggacaggggcggaccaggccccaaaggcgagccacacggaa

SEQ ID NO: 238597 - RNA, 61 nt, Homo sapiens
gccaagccacgcgccccccaccccccccagcagagacggcaagcaggaaacggaggacggg

SEQ ID NO: 238598 - RNA, 76 nt, Homo sapiens
ggaaacaccaggccaaagcggaggagaggaaggagggggaagggccaacgggaagacggaagccccaaccacaagg

SEQ ID NO: 238599 - RNA, 83 nt, Homo sapiens
agccggaggcccacgaaaccaaaaggaagcagcgaccacgccacaccacagcagcagaagaaagaaaggagaagggccaagcc

SEQ ID NO: 238600 - RNA, 76 nt, Homo sapiens
gagagcggagcagaagagcgcccccgggggagaggcaccagcaacagaccaaccgcagcaagcacagagacaggaa

SEQ ID NO: 238601 - RNA, 66 nt, Homo sapiens
cacgccgcgcggggaaacaaggaaggcagccaccaaaggacaggagaaaagaaagcaaccagccga

SEQ ID NO: 238602 - RNA, 36 nt, Homo sapiens
caggaccccccccaacgagagcaggcccgacccgga

SEQ ID NO: 238603 - RNA, 78 nt, Homo sapiens
gaaaagaaagcgggagagacaagaagggccgcacagaaggaagaaaagccaggcaagggggccaaccgccaggaagga

SEQ ID NO: 238604 - RNA, 75 nt, Homo sapiens
cacaaagcaagagcaacaaacggaaaaggagacacaccaggagcccagcaacacaacagcccggcagcaaaccga

SEQ ID NO: 238605 - RNA, 74 nt, Homo sapiens
caagacacggaccacgaggacggaagagcggacccgggcgacacaggggacccaggccgccaaagcagcgccac

SEQ ID NO: 238606 - RNA, 73 nt, Homo sapiens
gcggccaggcgcagaagaagcacccagcaagcgagggaccgggacgccacagccagaaccgcaaccaggcggc

SEQ ID NO: 238607 - RNA, 86 nt, Homo sapiens
caagccgccgggagaaggaagaacggcgaggagcaaaggcagaggccaagcccagacccagacggacagcggaaaggcccgcgcgg

SEQ ID NO: 238608 - RNA, 70 nt, Homo sapiens
cagaaggagcaaaaggcggacaggcagacaacggcaagcggagaagagcaaggccgaaccgagaggaagg

SEQ ID NO: 238609 - RNA, 58 nt, Homo sapiens
ggagggagcaggagcggaccggcccggaagccgaaaccgcggggaggccccaggggcc

SEQ ID NO: 238610 - RNA, 68 nt, Homo sapiens
acgggaagaggaaaaggaaccgaggcagacggagcggacggaaagaaaaccagacgagagacagaaga

SEQ ID NO: 238611 - RNA, 82 nt, Homo sapiens
gggacccggggcacagggcagccgccacaccgcagaagggcagagaaccggcagcccacaacaggacgccagagcggcaggg

SEQ ID NO: 238612 - RNA, 76 nt, Homo sapiens
gaagcagccgccggcgcgcgagccacacaacccgcgccggccgcgggaaggagaggcaaaacggaggaggcaggga

SEQ ID NO: 238613 - RNA, 76 nt, Homo sapiens
ggcaagacagaaaacaccgagcacacaggaccagaacagcgcaggagcacagagaggccggaaaaccccagagagg

SEQ ID NO: 238614 - RNA, 56 nt, Homo sapiens
gggaacgagggcgagcagaggacgacaggccgggagagggaaaagaggacgaggcg

SEQ ID NO: 238615 - RNA, 72 nt, Homo sapiens
acgggaagcgaccgcaggcgggcccccgaccggaaagcaggcagcgagaggaacacaacagcgagcaacagc

SEQ ID NO: 238616 - RNA, 82 nt, Homo sapiens
cccgcccgcgggccaagaaacggagaaaccggaggacccgccgcaagacaagccgagaccaccaggagcagagcggaggcaa

SEQ ID NO: 238617 - RNA, 98 nt, Homo sapiens
acagaggaccaaggaagcagcagcgcgagacggacaaaggaaaggggaaacgaaaagagacagcagggcaaaacgggccacacacagggcaaaaagaa

SEQ ID NO: 238618 - RNA, 73 nt, Homo sapiens
ggccaaagggagagggaagccacaacaagccaaagaagaaggcaaagaaagacgccacaacggaaccagagga

SEQ ID NO: 238619 - RNA, 84 nt, Homo sapiens
cgggccaacaggggcaggaggcacaaggccacacaacggaccacacaagcaggcccccacggccccaggagaaagcgcgggcga

SEQ ID NO: 238620 - RNA, 66 nt, Homo sapiens
gcgggaagaaaagcagggcaggcacggggacgaaagaaaaacgggaccagacacacgcaaggacac

SEQ ID NO: 238621 - RNA, 80 nt, Homo sapiens
ggcaaggcggcggcgccgggggaccccaaagccccaccccacaaggcacgccagccaaaacggccgcggaaacgaaaacg

SEQ ID NO: 238622 - RNA, 76 nt, Homo sapiens
ccaagacggcacaaaggcggacacgaaaccaccgggaagcgccggggaacgcaggcgaaaaggaaacacacaaaaa

SEQ ID NO: 238623 - RNA, 57 nt, Homo sapiens
ccagggcaaggacggaggaacgaagacacggggaggcgacaccccaagagggccgcc

SEQ ID NO: 238624 - RNA, 82 nt, Homo sapiens
caacaagaggacccaggagaaacgccccaaagacaaagccggaggcagaagcaggaaaccagagggagagccggcgcaggcg

SEQ ID NO: 238625 - RNA, 74 nt, Homo sapiens
caaaaacacacccagggaggcaagcagagcgcggccaagaacagaggaaggggaagaccgaggagcagggagca

SEQ ID NO: 238626 - RNA, 78 nt, Homo sapiens
ccgcgcagcgggcgagaagcgcccggccagccggcggagcccacgacgagcggaaaagagcccaaaaggcagagcgag

SEQ ID NO: 238627 - RNA, 78 nt, Homo sapiens
acagggcgcaggagagcgccgggaccggacagggcggagcagcgcagaggaaaggcggcagccagagcaccggcccag

SEQ ID NO: 238628 - RNA, 71 nt, Homo sapiens
cgaggagaaacagcagaaacgcaccaggccaaagaaagagaagcgccaccagcaaaaccagagaaacaggc

SEQ ID NO: 238629 - RNA, 52 nt, Homo sapiens
accaggcaccaccggccccggaagaacgacacaggacaacagaaagaaaaca

SEQ ID NO: 238630 - RNA, 74 nt, Homo sapiens
cgagccccaacccacgcgccccaaggcgagaacgcggacaagcaaacaaagaggaaaaagagggcaacagcgaa

SEQ ID NO: 238631 - RNA, 65 nt, Homo sapiens
gcgagcggcagcaggacaccccggggggaaacccgcccagggcgggagaccgccaagaaacacca

SEQ ID NO: 238632 - RNA, 61 nt, Homo sapiens
gccacagggcacgcaagaccagccgaagccgcggggccgaccaggagggccggaggaccca

SEQ ID NO: 238633 - RNA, 78 nt, Homo sapiens
gccacccagcggggagcacggcgagcagccaggccaggagagagagcccagaggaccggcggcccgaccaaagaagaa

SEQ ID NO: 238634 - RNA, 77 nt, Homo sapiens
ggagcgaaaccggccacggaaaacgaagaggaagagcggcggaagcagccagggcagccggggacacagccaaggcc

SEQ ID NO: 238635 - RNA, 77 nt, Homo sapiens
aaaacagaagaggcgagagaaaggagacgacagcgaaaaaaagggaacccagagagggggcccgcccgcccgacaca

SEQ ID NO: 238636 - RNA, 74 nt, Homo sapiens
cgcagggcgcccccgaaacagaccaccccaggaaaagagaaccgccgaaaagacaagaacaaaccgaacccgag

SEQ ID NO: 238637 - RNA, 67 nt, Homo sapiens
cggccccccacgcgcacacaagggagcccccccaccacccccgaggaaaaggaaaccagaagaggga

SEQ ID NO: 238638 - RNA, 77 nt, Homo sapiens
gggagcggaacaagaagacagaaaccagcaggagccaccggaacgacggagcagaggagaggaggaggccgagagac

SEQ ID NO: 238639 - RNA, 81 nt, Homo sapiens
ggcagacaaaagggccaaagaagggagagaggcagcgccagacccggccacgaggaccagggggggagacggcagcccagc

SEQ ID NO: 238640 - RNA, 74 nt, Homo sapiens
ccgaacaccgggggcgggcagccgaggccgggaaccagcgaggacggggcccggagcagagacgagcggaagag

SEQ ID NO: 238641 - RNA, 80 nt, Homo sapiens
cccccgggggaaaagagacaccgacaagacaccacggacgagagacaaacgccgaaggggccagagaacaagcccagaca

SEQ ID NO: 238642 - RNA, 69 nt, Homo sapiens
ccacagaggaagccccggacggcggggcggaggccggggggaggaaacagcgagacaccaaacagaagc

SEQ ID NO: 238643 - RNA, 83 nt, Homo sapiens
cgccgccgccagaagggagcaaggaggaccaccgcggcggccgccaggagagccggggagcagcgggccggcgcgaggcgccc

SEQ ID NO: 238644 - RNA, 80 nt, Homo sapiens
aggcagcgggagccgaaaacggaaggacagcagggaagaacggaaaccagagaaagaaacgcccccacacaaaagcgaga

SEQ ID NO: 238645 - RNA, 50 nt, Homo sapiens
cggaggaaaaggaagcgggcggacccggaaccccacaggccgaggcacga

SEQ ID NO: 238646 - RNA, 79 nt, Homo sapiens
ggaaccgcccgccgccacacgcgcaaagcccgggaacgaagaaggacagaacggacaaggcagagcaaggaaaagacgg

SEQ ID NO: 238647 - RNA, 80 nt, Homo sapiens
cgaacagcaggcgccaccagcccggaggaaggagggccccggagcagccacaccaccgaggccccacccagcacgagcac

SEQ ID NO: 238648 - RNA, 81 nt, Homo sapiens
acaaaagcacacaaagaccccccccacaggggagacagaggaagccaggagggaagcccagaagacgcacaagagagaccg

SEQ ID NO: 238649 - RNA, 62 nt, Homo sapiens
gggacggaaccacaacaagaaggacagcaaaggagcaggagggaaggaacaccccacgacaa

SEQ ID NO: 238650 - RNA, 83 nt, Homo sapiens
ccgggacccaccacccaggccccgacgccccgaggggccggccaggacggggccgaagcgcaccggcccagcgggcaagaagc

SEQ ID NO: 238651 - RNA, 77 nt, Homo sapiens
ggggcgcccccccgaggcgcgccacccccggcaccagagcccgggaagcgcagagggaacacggccacgaggggaac

SEQ ID NO: 238652 - RNA, 72 nt, Homo sapiens
cgcaggaagacgcagccggccgcgcccccaggccagaacgcggagacggacaagaagcgagccgcgcacacc

SEQ ID NO: 238653 - RNA, 77 nt, Homo sapiens
gcccgcgcgacaccacccgcaagggcacagcaccagccagacaggcaagcagaccacccgcgaggcggccccaccag

SEQ ID NO: 238654 - RNA, 61 nt, Homo sapiens
ggaaacaacaaagaaacaaccggcccagagagaagcgggaagaccacacagaacaccagcg

SEQ ID NO: 238655 - RNA, 53 nt, Homo sapiens
ggacgcagccgcggccggccagaaaaggccagggacgccgccgaaagaaagac

SEQ ID NO: 238656 - RNA, 78 nt, Homo sapiens
agcaggagacccacgagcagcccccacgacagccagacacaacaacagggggcgagaggaaccaggaacaagaaggag

SEQ ID NO: 238657 - RNA, 52 nt, Homo sapiens
aacgagggacaacacagacccaccagcagagaaacggaaacggccagaagca

SEQ ID NO: 238658 - RNA, 59 nt, Homo sapiens
agaagcacaaagcgcccgagagacaaagaccacaggccaggcggcgaacccggcccaag

SEQ ID NO: 238659 - RNA, 67 nt, Homo sapiens
acgggcaggagccgaaagggaagcacacggaccagcagaacagaaacaagaaggggggcagaaagaa

SEQ ID NO: 238660 - RNA, 80 nt, Homo sapiens
ggcccaccagcccccacgcagaggccagcgaccacaagcagaagaggccccgggggcgccgagggcacaagggcaacgac

SEQ ID NO: 238661 - RNA, 65 nt, Homo sapiens
ggcacgaaaagggggcgaggaagagagaaggcgaaggcacaaaacagagaggcacagagagaaaa

SEQ ID NO: 238662 - RNA, 54 nt, Homo sapiens
gccaccgacccaacagaggcaagggccagggcgaaagggcaaggcaccaacggg

SEQ ID NO: 238663 - RNA, 69 nt, Homo sapiens
gcggcccccggcacaggcagcggaggagcccgaccgacccgggcgaccgcagaacaaggacagcagaaa

SEQ ID NO: 238664 - RNA, 75 nt, Homo sapiens
aaacccagaacacgggagaaaaaggaaaacgcggaaaaccgacacaacaggaggaagccagcccgagcaggccca

SEQ ID NO: 238665 - RNA, 74 nt, Homo sapiens
caccaccccaccccgaaagcccagcgagcccacaagaccaccaaagaaccgcgcacacagaagcggaagcgagc

SEQ ID NO: 238666 - RNA, 67 nt, Homo sapiens
cgccccggcagggaccaccaaccagcagccaacaaggacggaggagcaggcaagaaggaaacaagcg

SEQ ID NO: 238667 - RNA, 70 nt, Homo sapiens
gagagcccagcagaacggagcaagaagcaaggaggggggaagcacaagagggaaacaacaacagccaaag

SEQ ID NO: 238668 - RNA, 66 nt, Homo sapiens
gggaaagccgccccaaaacggcaccccggagaaaagaagaccacagaaacagccaaccccaggcag

SEQ ID NO: 238669 - RNA, 41 nt, Homo sapiens
gaagagccccccagggggaggaaccggacacaccaaaccac

SEQ ID NO: 238670 - RNA, 69 nt, Homo sapiens
agaaagaaccggaagacagaggcggagggcgaacagagccagacggccaccccaggagccagaaaaggg

SEQ ID NO: 238671 - RNA, 94 nt, Homo sapiens
aacccacacaggacacggaaggagcaaggcgaagaaccagaccggaccaggggcgggggaaaaaccgagggaaggacggggaaccggacaaacc

SEQ ID NO: 238672 - RNA, 73 nt, Homo sapiens
caggcaaggcgcccagcgggaacgccagaaagaaggacgacaccggacaagaggcacaagccagaagacgaac

SEQ ID NO: 238673 - RNA, 77 nt, Homo sapiens
gacagcgaggacagaaggaaggacggggaggacgcacgacgcgcggcacgggaacgcagccggcacaaccaccacgc

SEQ ID NO: 238674 - RNA, 77 nt, Homo sapiens
gacgcgcggggcgggccgccagcggggacaggcagcgaacaaaaaccggagacagaccaaaccaagaaggcagagaa

SEQ ID NO: 238675 - RNA, 63 nt, Homo sapiens
ccgcggccccaggcgcgcggagagcagggcccgaaacagggggaaagagcagagccccaaccg

SEQ ID NO: 238676 - RNA, 53 nt, Homo sapiens
cggaccccccgaacagaaacagagcgaccaagccagaagaacaaccagaaaca

SEQ ID NO: 238677 - RNA, 61 nt, Homo sapiens
acagacaaaaggcaaagaaggaaaaggggaggaggaggggggcagcagaggagaggaggag

SEQ ID NO: 238678 - RNA, 78 nt, Homo sapiens
gggccgcaggcaggggggacccgcccaaccccgcaagaggagccaggagcacggggggaacaagaccgccgggacgga

SEQ ID NO: 238679 - RNA, 94 nt, Homo sapiens
gcccaagccaccgcaggggcaccaaaacacacaccgaaacccacgaagcagaccccacgagcgaaagggaaaaaacgaaggaggcaggaagagc

SEQ ID NO: 238680 - RNA, 87 nt, Homo sapiens
cggacacaaaccccggggccaccgagaaccccacagcgaaggaaaagaagaaggaaccagcaaagcgccacgaagcacaagcaagag

SEQ ID NO: 238681 - RNA, 53 nt, Homo sapiens
gcaagcggaagaaccgaacacacaaagacggccagcaggcagaaaaaaagaag

SEQ ID NO: 238682 - RNA, 70 nt, Homo sapiens
caaaggagaaacaaacacgaggggcacgcagaggcgccagggcaagagcaaaaggagccccagcccaggc

SEQ ID NO: 238683 - RNA, 80 nt, Homo sapiens
gccaacaagagaagagacacagaaacggaggacaagaagccggacacaaggcgccacggcagcggggcccgggcagaggg

SEQ ID NO: 238684 - RNA, 37 nt, Homo sapiens
acagagaaaagaaaggcagccagccacagagcccggc

SEQ ID NO: 238685 - RNA, 80 nt, Homo sapiens
aaagggcaagaaagagaagaagacaggaaaaaaaaaacaccgaggaagaaggagaaagacaaagccccgagaaagaccag

SEQ ID NO: 238686 - RNA, 57 nt, Homo sapiens
ggaacagcaaacggaacaagagaacagaccggccccccaaacacccgagcccagccc

SEQ ID NO: 238687 - RNA, 76 nt, Homo sapiens
agcaggggaaagcccgggccaagcgggaggcgcccccagccagagcagcggacgggagcgccaccgcagcacccgc

SEQ ID NO: 238688 - RNA, 81 nt, Homo sapiens
agcaccacgcagcacgcggcaccagaaggacagcgaccggccgccgcccagacccacgaagagaagggaaggaagagcccc

SEQ ID NO: 238689 - RNA, 94 nt, Homo sapiens
aggaaagcagaagcaaagaaggcacaggaaaccagcggcgagagagagcaggaagccggagcgagaacaagagacacccgacggcagaagaagc

SEQ ID NO: 238690 - RNA, 83 nt, Homo sapiens
ggacggggcgccggcgccgccgcccccgggccgcggccgcaggaggaaaaggcccacacgaccaggaagaaagaagaaagaga

SEQ ID NO: 238691 - RNA, 92 nt, Homo sapiens
ccccgagcgggagagggcaggcgagaaggcggcgaggaagcgcgcccggcgcacggaccgccgcgccgaccggagacaacagacgcaccagc

SEQ ID NO: 238692 - RNA, 60 nt, Homo sapiens
ggagaaaacccaaacgagagaccaagacacaccaccccagggggggcccaaccaccagga

SEQ ID NO: 238693 - RNA, 80 nt, Homo sapiens
caaggcaaaagacgaaaaccaccggaacggcgaagaggcaccaaaaagaaccgcagacaggccagcagaggaggacaggc

SEQ ID NO: 238694 - RNA, 81 nt, Homo sapiens
cccagggaagcgcagaaagcaggcgaacccgcggcgcaaaacggagaagcaggaaacaagggaagagaaacgggaacgcac

SEQ ID NO: 238695 - RNA, 73 nt, Homo sapiens
cggaaccacgcaccagacaacacaggaaccgaacaaagggagccaaggacaggccacgcagaaaacacagaga

SEQ ID NO: 238696 - RNA, 75 nt, Homo sapiens
acgccccccgggcggcggggagggagggcggagaacggaaaagcaccaggaagcagagaggaccgcagaagggaa

SEQ ID NO: 238697 - RNA, 85 nt, Homo sapiens
agaagaggagaggagacgggcagaagaagaaaagaggagaggaaagagaacagaagcaaaccgggcaaacaccaaaaagagaagc

SEQ ID NO: 238698 - RNA, 61 nt, Homo sapiens
gaaccccggaacaagaaccacgcccgcaccagccacgaccaagaaaacggggaaaaacaca

SEQ ID NO: 238699 - RNA, 78 nt, Homo sapiens
accgccgaggggcggccccccgcccgcgcggggcggcggggcggaacagccaccaagaccagccgggggaggcccccc

SEQ ID NO: 238700 - RNA, 79 nt, Homo sapiens
gggagcagcgggcagccacggcgcgagacaagccgagaccaccaggagcagagcggaggcaaccagccaaaacaacgga

SEQ ID NO: 238701 - RNA, 68 nt, Homo sapiens
ggagaaggaccaagaaccagagaagaccaagagacagaagggacgggacgaggacccggggaagacag

SEQ ID NO: 238702 - RNA, 70 nt, Homo sapiens
cccaaccgaaggggccacgaaccagagggaagagcaagggacaacagacaccaaacagccagaggaaggc

SEQ ID NO: 238703 - RNA, 72 nt, Homo sapiens
agacccaccgacgcccccagggcgagggacaggccgagcggagcccaaccagacggaggacaggcgcggcca

SEQ ID NO: 238704 - RNA, 59 nt, Homo sapiens
gaaggaccaagaaccagaggaggccaacacgccaccacccggggccaggaacggacagg

SEQ ID NO: 238705 - RNA, 54 nt, Homo sapiens
gagagaacccagcgccgacacgcagcacacggccaagggggccccaggacccgg

SEQ ID NO: 238706 - RNA, 77 nt, Homo sapiens
gccaaagaccccagcgacgggaaagcacagccagagaaagacagcaaagaaaaggagaagaaaggaaaaaaacaacc

SEQ ID NO: 238707 - RNA, 72 nt, Homo sapiens
agagcgaagcagaagacgaggacacgcagccggccgaggaccccccagccccgaaccagaagcggcaaacag

SEQ ID NO: 238708 - RNA, 51 nt, Homo sapiens
aaacagaggaggaggcgggaccaggcaagggccagggcccaccagaaggca

SEQ ID NO: 238709 - RNA, 48 nt, Homo sapiens
gcccgggcgcggaagaagccaagcaaaccagccagcacgggggcccag

SEQ ID NO: 238710 - RNA, 65 nt, Homo sapiens
gagcagcacacagacacggaagacagcgcacgccagcacgcaggcaggaggaagcgggcaaagga

SEQ ID NO: 238711 - RNA, 73 nt, Homo sapiens
gaagaagcagcgcaaggaccagagagaggccaccgcggcccacgagccgggggaccccgccagcagcgaagca

SEQ ID NO: 238712 - RNA, 81 nt, Homo sapiens
aagcaccgccacaagacagaggccaagagagagaaggcacaacagcaaagccagaggggagcacccgagccagacacagca

SEQ ID NO: 238713 - RNA, 77 nt, Homo sapiens
gagcaaacagcagaggcagaccaggacgcagaaaggacagggcccaaaaaggcaacaaacggagaaaggaggagaca

SEQ ID NO: 238714 - RNA, 81 nt, Homo sapiens
ccacaggggcccagaaacacaggcgaaaagcagacgaccaaacaggcacgagaaagagaacagccccagcccagggggaag

SEQ ID NO: 238715 - RNA, 84 nt, Homo sapiens
ggggaagagcagcgagagcgcggagcgggcggagcggcgagagcccccacggccgcgccaggcccagacacgcagaggagaccc

SEQ ID NO: 238716 - RNA, 40 nt, Homo sapiens
ggaggggaacgggacccgagcgccacggccaccacgcggc

SEQ ID NO: 238717 - RNA, 89 nt, Homo sapiens
ccggccggagcagcagcccgagaccccaagaagaagcggaagaggagccgcggaaccaagacacaaggaacagaagacaggaccaggaa

SEQ ID NO: 238718 - RNA, 75 nt, Homo sapiens
cgggcgagcagcaggagcgagcccgaggacaggagaggaaggcacccacgaggcggcgacggaaagccccccacg

SEQ ID NO: 238719 - RNA, 68 nt, Homo sapiens
ccgggaaccccacggcccccgccagcacacaccgagcagagggagggcgaggaagaccacagagaaaa

SEQ ID NO: 238720 - RNA, 73 nt, Homo sapiens
cccggccccgccgagcgcgccggaccggcgcccggacaacccgcaaccgccccaacaagcacagaggccgaaa

SEQ ID NO: 238721 - RNA, 64 nt, Homo sapiens
ggaaccagagggaaggaggaggggaagcaaggcaacggggcccgccggcaaggagaacgaccaa

SEQ ID NO: 238722 - RNA, 76 nt, Homo sapiens
gaaacccaaccacaccaagacccagcacgccggagaagcagcgccgacccaaagcgagccgccgagcgggggcagc

SEQ ID NO: 238723 - RNA, 82 nt, Homo sapiens
agggcgccaacagaccgcaaggaccccaaagaggcgcaagcaggcggacccagacaagagagaccgagcggaggcccggcgc

SEQ ID NO: 238724 - RNA, 76 nt, Homo sapiens
ccccaacaccagcaccgcagaggcaaggggccaccaggaggccagggggcgccaggagggaaacggaacagaacag

SEQ ID NO: 238725 - RNA, 68 nt, Homo sapiens
aggaaaacaggaacagagcgagggaggagagagggagagccaaagaagagagggagagaccagaggcg

SEQ ID NO: 238726 - RNA, 52 nt, Homo sapiens
gcaaaaaggagggaagaaagcccggaaggaaggagagaacggcgcaagcgcg

SEQ ID NO: 238727 - RNA, 82 nt, Homo sapiens
cacccccaggagggcgacaaggagcccagcacccagggcagaaagcagcccgggcgcgccaggcacagccaagagcggaccg

SEQ ID NO: 238728 - RNA, 94 nt, Homo sapiens
gaagagaaaggcaaagacgccgagaaggggacaaggacaccggagagagaagcaagagaggcagagaagagagacgcccaagagaagacagaga

SEQ ID NO: 238729 - RNA, 78 nt, Homo sapiens
cgacgccacgacagcgcccgcccacaggcgcggggacgcagaagccacgcaccaaagggccgagcaccacagacagcg

SEQ ID NO: 238730 - RNA, 67 nt, Homo sapiens
cagccaacacgaagagagcaggaggcacgggcgccgcaaccaagacccggcgggggcaaggaagcac

SEQ ID NO: 238731 - RNA, 75 nt, Homo sapiens
ggaaaacggacgagaacaagcggaaaacaggggcgaggggacaaggagaagaaaggcagcgcagcccggagagag

SEQ ID NO: 238732 - RNA, 67 nt, Homo sapiens
ggaagaaaaaacggcacagaaaggaagaaacggaagacaccgaaccacacccggccccccccaggag

SEQ ID NO: 238733 - RNA, 65 nt, Homo sapiens
cgaccgcgagcgcacgcgcgcccgaagggcaacgccgcccaacacagaaccaaggagagacacac

SEQ ID NO: 238734 - RNA, 59 nt, Homo sapiens
gaacaccggagacccgcaggcccccggacgcagacaccaccccaccgagagcaggcccc

SEQ ID NO: 238735 - RNA, 78 nt, Homo sapiens
gcagccaacaaacaaggaaggaacagcagcaaaaagaacacaaaggacagacagagagaggaagaacagggaaccgag

SEQ ID NO: 238736 - RNA, 76 nt, Homo sapiens
cccgcgccggagccccgggccaggaaagaccacagcaagaccacgcccccagccgggggaccaggccgaacgaccc

SEQ ID NO: 238737 - RNA, 43 nt, Homo sapiens
ggccaaagcacccgccagaagcaccggcccgaccagccacgac

SEQ ID NO: 238738 - RNA, 78 nt, Homo sapiens
ccccaggccccggggccccccccaaccgagccggaaagaccacagcaagaccacgcccccagccgggggaccaggccg

SEQ ID NO: 238739 - RNA, 76 nt, Homo sapiens
gacgcaacccacaggagaaagaaaggagagaccagagaagagaacaagcggaccaagcagaaaacggaagaaggca

SEQ ID NO: 238740 - RNA, 74 nt, Homo sapiens
gagagaggcaagacaagcgacgccgccgagaaacaaggggagagaaaacgaacccacagaaccagggaggggcc

SEQ ID NO: 238741 - RNA, 75 nt, Homo sapiens
gaggaggaagaagagaagcggacgccgcaggggaccccgcccgcaaagcccaccagccacggaagacagcgccag

SEQ ID NO: 238742 - RNA, 74 nt, Homo sapiens
ggagggccccgccgagcccagcccccagaaaggaggacaacgggacccagaagaggccaaacaagaagaggcag

SEQ ID NO: 238743 - RNA, 113 nt, Homo sapiens
cggcggcggcccaggcccggccccgaagagagcccggaaccaccggccgcagccgcagggcccggcgagaaaaaaccagcaggaacagacccacgcgagagcagaaggaccag

SEQ ID NO: 238744 - RNA, 74 nt, Homo sapiens
ggaaacacccgaccacccaaccacgcgcccagaccaagggcgcggcgcccagacggaacagggccgacaagcac

SEQ ID NO: 238745 - RNA, 71 nt, Homo sapiens
ccacaccaacagcacccaggggagcggccaaggacacagaaggaacagcaagcgaagcgacaggaccaaca

SEQ ID NO: 238746 - RNA, 64 nt, Homo sapiens
ggaccccagaaagaggggacagccgaaccagcccgaaacacggcaccgggggcggaaaagcaga

SEQ ID NO: 238747 - RNA, 73 nt, Homo sapiens
ccacgaacgaacaagagaggagccacacgaccggaaccaggcaaagacaaacgccgcaaaaggaccggaaaaa

SEQ ID NO: 238748 - RNA, 72 nt, Homo sapiens
ccacaagaccgcggggagcaaggcagagggggcgagggaggaaagggggcaaaacgacgaagaagacaagag

SEQ ID NO: 238749 - RNA, 78 nt, Homo sapiens
gggcggcccgcaggaccggaccgggggagggacaaacagcaggggccaagaaagaaggagagggggcgacaggacacc

SEQ ID NO: 238750 - RNA, 64 nt, Homo sapiens
gacgagccaccggaacccggaggacgggccagaagacgcacggaggcccagcccaggggaccca

SEQ ID NO: 238751 - RNA, 72 nt, Homo sapiens
aaccccaagcaccaccaccaccccggaaaccaggagagagacgaggaaagaaggaagcagcgaagcagggag

SEQ ID NO: 238752 - RNA, 85 nt, Homo sapiens
aacaaagaaaaccaaaacgcaacagaaacaacagccagagcccgggcgcgggaagagacagaccgggagaacaagcgaaggcgac

SEQ ID NO: 238753 - RNA, 78 nt, Homo sapiens
gcggcacccgggacaaggcagacgggagcgcaaggcgccccaaggccagacaaaaccacacaggggcggggcggcccg

SEQ ID NO: 238754 - RNA, 61 nt, Homo sapiens
gagaagacggaagaaagcagccaagacccgggggcagcaggggaccacgaccacaagccga

SEQ ID NO: 238755 - RNA, 56 nt, Homo sapiens
aacgaacgccaagacaagaagggagcgagaacccgagcagcgccagagcaacacac

SEQ ID NO: 238756 - RNA, 74 nt, Homo sapiens
gggcccagaggcccagggaggcaggggcagaaacagagaaggaacaggagggagccaggagcgcgggagcgaag

SEQ ID NO: 238757 - RNA, 82 nt, Homo sapiens
aaccagaagacgaacaaacagcaagaaagaccacaagaccaggaaaggcagcagaagcaacgcagcaagaaacgaagcggac

SEQ ID NO: 238758 - RNA, 64 nt, Homo sapiens
gaggacgccccaccgccgacgcccccagccaccaggacgaacagaaagcacgaccgcgccaaag

SEQ ID NO: 238759 - RNA, 70 nt, Homo sapiens
gaccaagggaaacacagcagaaagaggggaggaccagcgcaaccacgacagcaacgccaaagaggcggag

SEQ ID NO: 238760 - RNA, 70 nt, Homo sapiens
acggcagccacgacgccggcacccaaccagagaggaagacaacgaggggcccggcagcggcccgaccccg

SEQ ID NO: 238761 - RNA, 74 nt, Homo sapiens
gggccgcggaggggcacgagcgccacaaccccagggcccaggacagaaggcgggcaaggagcgccccccgagca

SEQ ID NO: 238762 - RNA, 62 nt, Homo sapiens
cgggcggagcgcccagacgcggggagccgccggagcgagaagagcgagccacccccggcgcc

SEQ ID NO: 238763 - RNA, 82 nt, Homo sapiens
aagagggagaacggcaacccaccagacaccagccgcacaacaaagagagcagggagagaagggggagaaaaggaacagaaaa

SEQ ID NO: 238764 - RNA, 74 nt, Homo sapiens
ccccacagaggggcgacggggaaggaacaaagcagagaaaccaaaaggccagacgaacacgagagggagcgaaa

SEQ ID NO: 238765 - RNA, 55 nt, Homo sapiens
cagaccagcaaagagaagagagcagccacagaaggaggccggaagaaaacgggga

SEQ ID NO: 238766 - RNA, 102 nt, Homo sapiens
agcgacccaggcaccgcaggcagacgaggggagaggccgagggcggcgacaagaaccgacaagcagaccggaagaccgacggaagaccacaccccgagggag

SEQ ID NO: 238767 - RNA, 69 nt, Homo sapiens
cgccccaggacagccagccgcggccgaaggggggcggcgcaggacgagagcccccgcaggacccggggc

SEQ ID NO: 238768 - RNA, 82 nt, Homo sapiens
gccgcccggacacgaagggagcagaggacagaaccggaccggaggcaggagcacagaccagcgcgcgaccggagccccacag

SEQ ID NO: 238769 - RNA, 82 nt, Homo sapiens
gagaccggaccgcgccacaaggagagcacgagccagggagccgccgggaccggcccgggagacgacaacccaaaccgaaaag

SEQ ID NO: 238770 - RNA, 33 nt, Homo sapiens
aagacaacgcacgggccgccaccccggcagagc

SEQ ID NO: 238771 - RNA, 71 nt, Homo sapiens
gccccccacagggcagcagaggggaccgaaggcggcgcaggccagcaggccagcagcggccaagaacagga

SEQ ID NO: 238772 - RNA, 81 nt, Homo sapiens
cagaaaaagagcaaagagaaaacaagagacgcgaccaggacagagaggcagggagcacaaaaagaaacccgaaaacccagg

SEQ ID NO: 238773 - RNA, 53 nt, Homo sapiens
aagggcagggacagcgcaggcagcaggcaaggacggggacacaagaccagcca

SEQ ID NO: 238774 - RNA, 84 nt, Homo sapiens
ggcccggccgcccgccagcggccaagaagcccgcccagggcacacgggccacagaggaccagcaaggagaagaaaggagcagca

SEQ ID NO: 238775 - RNA, 71 nt, Homo sapiens
ggacaacaggaaaaacccagccaggggggccacgggccccgaccgcccacaagcgcacgggggcacccaac

SEQ ID NO: 238776 - RNA, 81 nt, Homo sapiens
gaagcacagggcacgccaacccaggaggaacggcgaagccccaaccccgaagaacaagaacaggaggcgggccgagcaccc

SEQ ID NO: 238777 - RNA, 70 nt, Homo sapiens
gaaggacccagacccacagagaacacgaacagcgccgcaaagcacagccaaggacacccgaaacacggag

SEQ ID NO: 238778 - RNA, 76 nt, Homo sapiens
ggaccgagaccggaccgagagcggaccgagagcgcgaaacgcacgagaagagcgccgcacccacaccaaaggaagc

SEQ ID NO: 238779 - RNA, 68 nt, Homo sapiens
caagggaccgaaagcagacccggaaagggcacccgcagacaaggcccagcagggggggggaaaggcag

SEQ ID NO: 238780 - RNA, 85 nt, Homo sapiens
gacggccggcacagaaggaggccaccagccacgccgcacgcgccgccaacgggaacaaggcagaccaaccaccccaccgggccac

SEQ ID NO: 238781 - RNA, 74 nt, Homo sapiens
gaagcccagcagcaacaccccaaacagcggcgcacggggcacaacaggagagcacgcgcaagggaccaccaccg

SEQ ID NO: 238782 - RNA, 89 nt, Homo sapiens
cgcgagcgagccgcgaaccgagcgggcggcgggcgcgcgcaccagggggagaaacccgggaccaggaccgaaccccaccaggaggcacc

SEQ ID NO: 238783 - RNA, 109 nt, Homo sapiens
acaggaaaagcaggccgaagaaccgagcgacagagacaagcgagcgccgcacaaaaagcagagagcacggccccagaagccgccggaaaacccgcgaaaccaagggcca

SEQ ID NO: 238784 - RNA, 55 nt, Homo sapiens
aagccggcaaacagaagagggagaagagcccaacaccaaagcccaggaacacagg

SEQ ID NO: 238785 - RNA, 67 nt, Homo sapiens
ggacccagggccgcgggaggcgggggagcgggacggccacgcagagcggagcaggagagcgggccga

SEQ ID NO: 238786 - RNA, 80 nt, Homo sapiens
cggcccggagagacgaaccgaagcgggcgggcccccccacccagaggagcgccccaaaagaaacaaagccaaccaggcaa

SEQ ID NO: 238787 - RNA, 104 nt, Homo sapiens
aaaaaggccaacaagaaacaggagaacgggaagccccgccgagaaaagccaccacgcggcgcaaaaaccagacaccccacaccaccacccagacgaccaaaagg

SEQ ID NO: 238788 - RNA, 71 nt, Homo sapiens
acccgccgcgcccaagccccgcggggaagaacggcacgcgggacagcagaccacagcccggcaggcccaaa

SEQ ID NO: 238789 - RNA, 75 nt, Homo sapiens
gaagcagcgaccacaggcagaaggagccgaagagaagacaaggcgcaggggcacagaaagggcagacaggcaggc

SEQ ID NO: 238790 - RNA, 55 nt, Homo sapiens
gagggagccccaagccggcggccaagacggagccgagaacacgaggacccaaaga

SEQ ID NO: 238791 - RNA, 80 nt, Homo sapiens
ggagaggccgaggggagaaggggaggcagcgcggcccaggggcgggaagaagcccgccgccaccaccccaccaccagcgc

SEQ ID NO: 238792 - RNA, 73 nt, Homo sapiens
gggccggcgagcgcagcgcgaccgggaggcccagggaagaagcaaaagagaaaaaaaggcaaaagaaaaaaag

SEQ ID NO: 238793 - RNA, 75 nt, Homo sapiens
ggcagcagcagggacccccagaaggacaagccacacaagaaggagaaaaaaaagagaaggcaccccacacccgag

SEQ ID NO: 238794 - RNA, 85 nt, Homo sapiens
gagcgcccgaaggcgaccgaggcccgagccccacaagaggagccaggagcacggggggaacaagaccgccgggacggaagacggg

SEQ ID NO: 238795 - RNA, 65 nt, Homo sapiens
aagacgagagagagggagcaccaacaccgccgacccaaccgagaaaaaagagcgcccgcccaggc

SEQ ID NO: 238796 - RNA, 76 nt, Homo sapiens
ccacaaccacaggcacagggaccgccagaaaccaaagacgagaggaagggcaccaggagcaaggacgggaagagaa

SEQ ID NO: 238797 - RNA, 66 nt, Homo sapiens
gaagaaggagggaaagccaaacaacggacaaagaccagggaagcaccccagaaggcccgcaaagaa

SEQ ID NO: 238798 - RNA, 70 nt, Homo sapiens
cggaccccagcgaccagcaccgccgcccaccacccgacccagagcccccgcccgcgacaggcgccacccg

SEQ ID NO: 238799 - RNA, 59 nt, Homo sapiens
gcaccggagcagggccaccacgcgccgaaccccacgccagcgggcacacaccagaccga

SEQ ID NO: 238800 - RNA, 71 nt, Homo sapiens
gcaccgcggcagacgggaccacgaggcaacgccccaggaggccccaaacagaaacaagaggagaccccaaa

SEQ ID NO: 238801 - RNA, 68 nt, Homo sapiens
acgggcaggaggaaaacccagaaaacagccaccccaagagcaacagccagacgccgcacgccagccca

SEQ ID NO: 238802 - RNA, 61 nt, Homo sapiens
caaaggcggaggcggaaggggaaagccggagccggccagacgcgcggcccccagccccccc

SEQ ID NO: 238803 - RNA, 60 nt, Homo sapiens
cgaacccagccgcaccggaaggggaggagcacagaacgccaggaccaaaacagggagaaa

SEQ ID NO: 238804 - RNA, 80 nt, Homo sapiens
gccacccgccacgcgcccccgaagccccagaccggaggccagcccccaccggaagaagcgggcggagaaccggaggaccc

SEQ ID NO: 238805 - RNA, 76 nt, Homo sapiens
ggaaaagccacgccgccacccacgacggcgaggcgcgcaaggaagacaggaccccccggcggaggaaagaggaccc

SEQ ID NO: 238806 - RNA, 44 nt, Homo sapiens
gaaggaccaagaaccagcaggaagcaaaggagaagaacacaacg

SEQ ID NO: 238807 - RNA, 60 nt, Homo sapiens
gagagcagacaaccacacccacgggcaggcaccaagcagccgaagagaaacaagggacag

SEQ ID NO: 238808 - RNA, 43 nt, Homo sapiens
aaacaaaagagaagaagagcgaaagagacggggcgccagggcc

SEQ ID NO: 238809 - RNA, 72 nt, Homo sapiens
cccagcccccaggaggaccagcaagggccgggcccaggagcgccggccccaggaaacgccaagagcgagcgg

SEQ ID NO: 238810 - RNA, 75 nt, Homo sapiens
aggagacagagggcggagcacaccaggaacccggcaccacccagggcggggggaaaagcggcgcaggagaccaga

SEQ ID NO: 238811 - RNA, 61 nt, Homo sapiens
cggcgacaagcacaggaaaagacagggagacggaagagcgggggaccgaaggaacaaagag

SEQ ID NO: 238812 - RNA, 75 nt, Homo sapiens
gcagggacacacggcagagcaggccaagccagaaaggagccacacgaccccgccagcgcaggccgagccggagaa

SEQ ID NO: 238813 - RNA, 78 nt, Homo sapiens
gacaagacgacagggcgccggcagcaccgggggccgcagcaggaggcgacaagagcaccaggagacaaagccacaaaa

SEQ ID NO: 238814 - RNA, 72 nt, Homo sapiens
agggcaacacagagacaaaaacaggagaaggaacacaaaaccagccagcagaagcgcgacaggaacaccccc

SEQ ID NO: 238815 - RNA, 71 nt, Homo sapiens
cgcaccaaccgcgcgcaccgccgacccggaagaccgccgccgcggagaccagaggcccacggccaacagcc

SEQ ID NO: 238816 - RNA, 75 nt, Homo sapiens
aggcgaaggagcggggccgaggggagcccaaaagcacgaagcgccagaggacaccgcggcccgaggacgccaccg

SEQ ID NO: 238817 - RNA, 63 nt, Homo sapiens
cccagcaccgagaacacacccaacacaccagccagcccgaccagagagggaaccgcgggaagc

SEQ ID NO: 238818 - RNA, 87 nt, Homo sapiens
cacgaaaggaggaggaaccggagaccccgaaaacggaagcgcagggagaaggaagaggggaaaagaacccgcacggggcgcgcagcc

SEQ ID NO: 238819 - RNA, 78 nt, Homo sapiens
accgcggcagaagaaagcaagacccaggacaccccgaagccgagaaaggaaccagagaaacggagcgaaaccgaagag

SEQ ID NO: 238820 - RNA, 74 nt, Homo sapiens
gaccgagagcgcagacccgaaagaagacggagacagggaaagagaaggcacagggcagagcaacagagacacag

SEQ ID NO: 238821 - RNA, 74 nt, Homo sapiens
agcgagccgccgacccgccgagcaaaagggaccccgacggagagacaaagaagacggagggggggccagccacc

SEQ ID NO: 238822 - RNA, 70 nt, Homo sapiens
cgccaaaaaacaacagcagccacaccagagccaccacccacacagcagcggggaacacgacagccaaagg

SEQ ID NO: 238823 - RNA, 83 nt, Homo sapiens
gagagcaagggccaggggagcccagcggcgcgccggcagcaggccccgagccccggccccaaagacccaaaacagagacaccc

SEQ ID NO: 238824 - RNA, 37 nt, Homo sapiens
aaagaacgacacccaaagggaaagcagcacaaagcac

SEQ ID NO: 238825 - RNA, 69 nt, Homo sapiens
cccgacagaaggagcagcacaaggaaaacgagagaaacgaaggcgagagaaacagcaaggcccgagccc

SEQ ID NO: 238826 - RNA, 79 nt, Homo sapiens
cccgcgcgcgccgcgccgcccgagcacgccgcgcagcccggccgccggcccccaacagcgccgcaaaagggagaccaca

SEQ ID NO: 238827 - RNA, 80 nt, Homo sapiens
ggagaggacaaggagaggagcggcggcggccggggcagcgccgcgagccagcaacgggggaaggccacaacaccacggag

SEQ ID NO: 238828 - RNA, 37 nt, Homo sapiens
gccccgaagagcgggaacagcggaccagcagacaaca

SEQ ID NO: 238829 - RNA, 52 nt, Homo sapiens
ggagaagcccggcccggcccgcccgagaagccgggagagacgggggcaccag

SEQ ID NO: 238830 - RNA, 77 nt, Homo sapiens
cgaaggagaggcccagaacccagccggacgggaaacacacggaccaagcaaagacccagcaccggggaagagcaaga

SEQ ID NO: 238831 - RNA, 76 nt, Homo sapiens
cacaggaccgccaccgggcgcccagcaggccgacgggcgcccgacggcccagcccgccccagggggggccacggcc

SEQ ID NO: 238832 - RNA, 86 nt, Homo sapiens
aaggcaaaaagcagcaagggaaaacagcccaagcaccaagcgccagaagaaccggaagcccagccagggacaagcacccacagaga

SEQ ID NO: 238833 - RNA, 73 nt, Homo sapiens
gggcccgaagggagcgggaggaggcgcaccccacagaccagaacaaaaaccagaaaaaaggaacaacaagaaa

SEQ ID NO: 238834 - RNA, 71 nt, Homo sapiens
aaaaaacaaaagcagcccaagcaccaggagggaaagaaaagaggcccggaagagagccaccacgacggcag

SEQ ID NO: 238835 - RNA, 50 nt, Homo sapiens
acccagaagagccaagaaagaaaaggcagcgaaaggacaggggcgggagc

SEQ ID NO: 238836 - RNA, 80 nt, Homo sapiens
gaaccaggggagagcgacccaaacaaagggagggcaagagccaggggagaccaccagacacaaccacagccggccaaggg

SEQ ID NO: 238837 - RNA, 75 nt, Homo sapiens
aggccccccccaacggcacaacaccagcaaaacagaaccccaaaccccaacaaggaccagaggccgaggagggcg

SEQ ID NO: 238838 - RNA, 75 nt, Homo sapiens
cggccccccacgcgcacacaagggagcccccccaccacccccgagggaaaggccagacagcgcagcagccgccag

SEQ ID NO: 238839 - RNA, 76 nt, Homo sapiens
gaggaccaggcgcggcgcggcgcggcgaggcccaggaggcaagagcgagaagagcgcaagacagaaagcgaaagcc

SEQ ID NO: 238840 - RNA, 83 nt, Homo sapiens
gaagcagccgaccagccgcggagccgggggcagaagagacaacagccacaagggacaaaaggaagacaagggagaagcacaca

SEQ ID NO: 238841 - RNA, 39 nt, Homo sapiens
aaggaggacgcagcgcaaggggagaagcagaccgcacca

SEQ ID NO: 238842 - RNA, 71 nt, Homo sapiens
agcacccacagcagagcgcaggaaagacaagccgggagcagacaagaggaaggaacgcaggagcgcagaac

SEQ ID NO: 238843 - RNA, 79 nt, Homo sapiens
ccaggacccggaaagagcacaggaaggaggccaaggacggagccgccgccacccggcaaaggaagaccgaccacgggcc

SEQ ID NO: 238844 - RNA, 111 nt, Homo sapiens
gcacacgcaccacgggcacccgaccggaacagcacacacaccaccaaccacagaggcaggggccagagaggccgaggggagaagcaccccagacggagcgccaaaggcggg

SEQ ID NO: 238845 - RNA, 75 nt, Homo sapiens
gaacccggccagcgcggaaaaaggacaggcgaagccgacgagcccgaacagacgcaccagcgggaggaagaggga

SEQ ID NO: 238846 - RNA, 56 nt, Homo sapiens
cagaagcgcggccaaggaggaagcaggccaggggaagccaggaagggaccaggcca

SEQ ID NO: 238847 - RNA, 98 nt, Homo sapiens
agaaaaaagagaagaaggaaagaagcgaagccaaagaaaacagccgaagacagcagacagccacaaaaggaagaagaaggcagcgggcaaggagagcg

SEQ ID NO: 238848 - RNA, 81 nt, Homo sapiens
ccagcccagcacgccgcgacggccccgggaaggaggacagaaggcaagcagcaaggaacaaggaaagagcgaaggccacca

SEQ ID NO: 238849 - RNA, 38 nt, Homo sapiens
ccgggagaccccggacacgggccggaaaacggaagaga

SEQ ID NO: 238850 - RNA, 58 nt, Homo sapiens
agccgaggaccaccacagaaggaagaaggggcgacagcaagaaggagccagcacagag

SEQ ID NO: 238851 - RNA, 84 nt, Homo sapiens
gggggggccgcccgcccaaggcaggaagaggggccgcaaagaagacggccagagagaaaagaaaagggagagggagccccaacg

SEQ ID NO: 238852 - RNA, 78 nt, Homo sapiens
gggcaccagggccgaccgccgcagcgaaaccaggcccaaaagaccaccagggagaccccggaagaagacgaccagaaa

SEQ ID NO: 238853 - RNA, 83 nt, Homo sapiens
cagaacccgacaagaagcacgaacagcaggccaaagaccagaggcagcgggcggaggacggggcaccagagaacccaccggaa

SEQ ID NO: 238854 - RNA, 74 nt, Homo sapiens
ggccacagcacgcagccccaggcagaaaggagaagcaggcaagcagcacagaaaggaacaaacacagggaaaaa

SEQ ID NO: 238855 - RNA, 40 nt, Homo sapiens
cggcaaagacacagacacgggaaagaacggccgggcgggc

SEQ ID NO: 238856 - RNA, 89 nt, Homo sapiens
gccggccccccccaacagcccccccgcggcgccggagccgcccgagcgggaagaagccgcagcaagccgcagcggcgcgcaccgggcgg

SEQ ID NO: 238857 - RNA, 75 nt, Homo sapiens
acaagacagggacaagaggacaacgcagaaagaacacacacacaagagggacagggaggacccagaagaggccgg

SEQ ID NO: 238858 - RNA, 44 nt, Homo sapiens
gagacggccagcgcaccaccgagcaggaccaaccaaacccgcaa

SEQ ID NO: 238859 - RNA, 67 nt, Homo sapiens
agcaagaacaagaacaagcgggaacccacacccaagaggaacaggaggcccggacccccagcacaag

SEQ ID NO: 238860 - RNA, 79 nt, Homo sapiens
cgaggaacagcgaaggggagcccagggaagcccgggaccgaaaaaacgcacaacagaagggcaaagacagcccaagaca

SEQ ID NO: 238861 - RNA, 72 nt, Homo sapiens
acaaaggaacagccccagcccggccccaggaacgaccagagaggacaaccaaaagcaccgaaccggaacaaa

SEQ ID NO: 238862 - RNA, 69 nt, Homo sapiens
cgaacgccaaacccaagggggagagggagaagggggggcacgaagaaaaccaaaggaaagagcgcccaa

SEQ ID NO: 238863 - RNA, 86 nt, Homo sapiens
cagcggagaaggagaagggagaagaaacagcagccgcagcacaccgaaccccagacggcaaaagcaggagagagcacgaagacaga

SEQ ID NO: 238864 - RNA, 77 nt, Homo sapiens
ccgcggggcgcgaacaccgaggcccgggcaggccacaaggccgggacagcagaaaacagccagcagaaaaagccaaa

SEQ ID NO: 238865 - RNA, 88 nt, Homo sapiens
ggggcccgcgcgcgcgccggcccagccgcgcgacgggaggacgaagccggccgcagaacgaagcgcgcggcaggcgcgcgccgcccca

SEQ ID NO: 238866 - RNA, 78 nt, Homo sapiens
aaagcggggcacaggcgggcacgcgcccagaacgcggaaaacaagaagaagacacccggagccacggcacgaacccgg

SEQ ID NO: 238867 - RNA, 78 nt, Homo sapiens
aagcccagggagaagagccaccacgccaccgcagaccagcggagcacggaaaggggcacagcgcaagcgggcgggaca

SEQ ID NO: 238868 - RNA, 74 nt, Homo sapiens
gccgagagccgcccgggccagcggccgcgcacccccggccggaggcaccagcaccgacacaaggacagagcacc

SEQ ID NO: 238869 - RNA, 78 nt, Homo sapiens
ggggagcggagagaaaccgaagggccccgaacaacagacgaaaaaccgccagaagccaaggaaaaggaacagagagag

SEQ ID NO: 238870 - RNA, 71 nt, Homo sapiens
cccgggcaaggggacgcgcagcgagaaacagaagagacagaaggagaggaccagaacagacgaaccggaaa

SEQ ID NO: 238871 - RNA, 73 nt, Homo sapiens
gcaagaggggggccaccagcaccccgggaccgggaaacaagggcccgacaagagaggcggagccacccccaca

SEQ ID NO: 238872 - RNA, 96 nt, Homo sapiens
gggaagcaaagcagccaacaccagaagaagggacaaaaggaaaggccgagggggacggcaagagcacacaccccggaccacggcccgggacacccg

SEQ ID NO: 238873 - RNA, 72 nt, Homo sapiens
gaaacaccccaacccccagagcaaacacgaggacaccgcacagggcgacccccaggcgagaacaaagacaag

SEQ ID NO: 238874 - RNA, 74 nt, Homo sapiens
cagcgggcccggggaggcaccgacgaggagcaacgaacagacagcagcccacaaccccaggcaggagcgggcga

SEQ ID NO: 238875 - RNA, 78 nt, Homo sapiens
ccggggccgcaaggccggagaaggccgccgggcccgggcaggggcggggcaacgcggaagcccagcgaccccggccca

SEQ ID NO: 238876 - RNA, 80 nt, Homo sapiens
gacggcggaccgcgggggagaacgaagcggacacaggaaaacgagaagaggcaggcaagcaaagagcagagcaccggaac

SEQ ID NO: 238877 - RNA, 72 nt, Homo sapiens
ggccgcgcgcgcggggcgcaggcgcaaggccgcggagacgggggcacggaggcggaacaacaggaacccccc

SEQ ID NO: 238878 - RNA, 72 nt, Homo sapiens
ggcaaaaaccccggagcccgaccaggacccgagaacaagacacagcaaagcccaggaaagaagcgaggaggg

SEQ ID NO: 238879 - RNA, 70 nt, Homo sapiens
ccacccagcacccaggccccgccccggcccccgccaccgggagcaaaggagccccggaaaaacggcgagc

SEQ ID NO: 238880 - RNA, 70 nt, Homo sapiens
cgggacccggccagaggaaagaacccgaggaacaagcgggaaacggagccaccaacaagcgggagaaaga

SEQ ID NO: 238881 - RNA, 73 nt, Homo sapiens
acagagaaccaagcggcaaagcaccgaacggaaaggagaagagacgaagaggcaccaaaaagaaaacagagaa

SEQ ID NO: 238882 - RNA, 64 nt, Homo sapiens
gagccccaagcacacgggaggcagaagcgaggaaggcagcccccaaaacgcaccaccgcccagc

SEQ ID NO: 238883 - RNA, 71 nt, Homo sapiens
ggaccagcagacagaagcccccgccaaagggaagcagggcagggcgcagaggaggccccagaaggcccgcg

SEQ ID NO: 238884 - RNA, 80 nt, Homo sapiens
caacaaaccaaaagaacaagcagcagaacaccgggggaaaaacaccaaggcaaaacacgaggagccggccacccaggcgg

SEQ ID NO: 238885 - RNA, 88 nt, Homo sapiens
ccccgggacaaggaagaggaagaggaggagaggccggggacgagcccgccccagcccaggccggccgcgccaggcaaaacgggcgggg

SEQ ID NO: 238886 - RNA, 87 nt, Homo sapiens
aggggaccgggaggggcgaaggcgggcggcagaggcgacaggccagacagaaaagggagccaggaccccagagaggagacccagcgc

SEQ ID NO: 238887 - RNA, 77 nt, Homo sapiens
ggacaaagcagaccgaaacagaagaggcaggggggacgaccaccagccaggccggggacaaacaggcaaccgacggg

SEQ ID NO: 238888 - RNA, 50 nt, Homo sapiens
aagggccaaagaagggagaaaaggcaagaacaaggaagaaaacgacaaga

SEQ ID NO: 238889 - RNA, 68 nt, Homo sapiens
ccgaggcgcgccacccccggcaccgcccaaaacggagaacgcggcaaaggaccaagcaaagaccccga

SEQ ID NO: 238890 - RNA, 83 nt, Homo sapiens
gaaaacgcggcgggggacggcgccccgggaagaccggggaagaggaagcggagagaagaaggaagcccgcgacccccaaggag

SEQ ID NO: 238891 - RNA, 78 nt, Homo sapiens
cgagacgcaccgcgggacgggaaccgcgacacaaggacagggcagaccgccagcagcacagcaagccacagagagggc

SEQ ID NO: 238892 - RNA, 83 nt, Homo sapiens
gaacaccgcacagagcagccggacgccccgaccaaggagccgggggggcgagcccgccgagagcgccaaggaggagacaacgg

SEQ ID NO: 238893 - RNA, 76 nt, Homo sapiens
ggagcggcgcagccggagggggccggagagaaacgggaccagaagccagagaggggggaagccacgcacaagacaa

SEQ ID NO: 238894 - RNA, 79 nt, Homo sapiens
aagaggcccacccggagaaccccacggagaaccagagcccagcaggccggaggccccgcgcacggagccgagagacgaa

SEQ ID NO: 238895 - RNA, 73 nt, Homo sapiens
ccgcgcccagcccgggccccgcgcacagccccagcgcagggaaacccagacgacaaggaaggccaagggaccc

SEQ ID NO: 238896 - RNA, 76 nt, Homo sapiens
gagaaagggaaccaaccaaacaagagaacagacagccacgcagacggaaacaaggcaacagaaagagcaacagcag

SEQ ID NO: 238897 - RNA, 54 nt, Homo sapiens
aaaccggcgcacaaggaacaacagaaaaaacaagagaggaagcccagaggaaca

SEQ ID NO: 238898 - RNA, 64 nt, Homo sapiens
gggccagaagcaggcgggacccaccaggccacacccagcggaaaagaccgccagcaacagacca

SEQ ID NO: 238899 - RNA, 78 nt, Homo sapiens
cagaaacacccgcagacacaccccaaaagacacagaggagaagagggccaggagcaacagcgaccagcgcggaccacg

SEQ ID NO: 238900 - RNA, 79 nt, Homo sapiens
ccaggagcggaggaccgaaccgcggccgacccagagccacccaccgagagacagaaagagcccgagcccagcacaggcc

SEQ ID NO: 238901 - RNA, 78 nt, Homo sapiens
agccaaggacgcacaacaccgcacggggcaggaagcgggaccccgagagaaacggcgagaaaaccaaacaggagccga

SEQ ID NO: 238902 - RNA, 79 nt, Homo sapiens
gccgcgagcccgacccccaggcagccgccgccccagcacccccagcgacacccgcgcccggagggaggccaacagaccc

SEQ ID NO: 238903 - RNA, 37 nt, Homo sapiens
cggagccgagcaaccagaggcgcccgcccaggaggac

SEQ ID NO: 238904 - RNA, 76 nt, Homo sapiens
gcagacagcggccaagaagacacaaaggacggaggcacggggacggaaagagagccgcagcgcagaacaagggaaa

SEQ ID NO: 238905 - RNA, 88 nt, Homo sapiens
gggaacccggaacaaggaaacaacggaaaaggccagaacccggcaccaagccacaaaacaggccagaccgggcacagacaccgcggac

SEQ ID NO: 238906 - RNA, 78 nt, Homo sapiens
gcgagcccagaggcggggcggagaaacagcacggccacccagcccggccaaggggaaaagccggaagacccagggggg

SEQ ID NO: 238907 - RNA, 133 nt, Homo sapiens
agaacacaacggaagcacagcagagcacggaaaacagcgaaacaccgaagggggccaggaagaacaaaggacaacaccacgacccggagacgggcagccgaaccggcgaggggcacccggagcacaagcgaag

SEQ ID NO: 238908 - RNA, 76 nt, Homo sapiens
agcgagggcaaaagccacagacaccgagagccggaaggacggcacaagcaggaaggggagacaaaccggacggcga

SEQ ID NO: 238909 - RNA, 80 nt, Homo sapiens
ggggaaccggccccacccgggaggggggagcggcgggaggccaccgccaggaccacccccggccacgccccgggccggcc

SEQ ID NO: 238910 - RNA, 73 nt, Homo sapiens
gaaccaaacgaaaggccacccaaggacggacagccagccaaacacacgccagagccacggcgcccaggcggag

SEQ ID NO: 238911 - RNA, 59 nt, Homo sapiens
gagagaagccgaaggaagccaagaaaccccaaagcacgagaacaaagaaagagacaaca

SEQ ID NO: 238912 - RNA, 74 nt, Homo sapiens
ccccagcccacgggacaagcgcaagagaacaaggagcggcccagagcaaaacagaggaacggacaccagacgca

SEQ ID NO: 238913 - RNA, 69 nt, Homo sapiens
gaccggacgggaagggccaggacgcgacaaggagaaacaccggcgcacacacaaggcgcccgccaggcg

SEQ ID NO: 238914 - RNA, 53 nt, Homo sapiens
gaccagaacagagaagaaagcagggaaacaggagaaccgacagaaaccccaag

SEQ ID NO: 238915 - RNA, 81 nt, Homo sapiens
cggacagcgaaggcagagagcagagcagcccgacggccaggaggcgaagagacgaggaagcccaggagcccgaacacaaaa

SEQ ID NO: 238916 - RNA, 77 nt, Homo sapiens
aggaggcccggggaagaaccgaagcaacggggcagagaccccccagcaagcaaggcggcacagggagaacacagggc

SEQ ID NO: 238917 - RNA, 73 nt, Homo sapiens
ggacacgaaaccgaggaagaaaggacagacgaaggaggaaaggaagcccggaagagagaaaaagaaggagaag

SEQ ID NO: 238918 - RNA, 74 nt, Homo sapiens
cggcggccagccagagagcacgccggccgcaacgcgcccggacgcggagggaggagccgcgaagccacacgggc

SEQ ID NO: 238919 - RNA, 75 nt, Homo sapiens
acccaaagcagagccgaaccgaaccaagccagccgccgcagcacgagcagacacagaaacggaacaccgggcaga

SEQ ID NO: 238920 - RNA, 72 nt, Homo sapiens
cagccagagagccaagaagaacagacagacaggcccagggagccgaaaggaggggcagcccgggacagcccg

SEQ ID NO: 238921 - RNA, 31 nt, Homo sapiens
cgcagggcgcccccgcccccgaagaaaaaaa

SEQ ID NO: 238922 - RNA, 76 nt, Homo sapiens
gcaacacaacaaaacaaaccccgacacagagccgcaggacacaccaggcaggccccgggcggaccgcagcaggcag

SEQ ID NO: 238923 - RNA, 69 nt, Homo sapiens
gaagaggaagccggcagaccgcaacacccacagcaggaggccgggcagaacgggccacggcccaggcgg

SEQ ID NO: 238924 - RNA, 79 nt, Homo sapiens
gacggcgggaccacaagacaacgcggagcggcgaagagcaaccagggggagagcacaaggcgaacaagcccccaggcga

SEQ ID NO: 238925 - RNA, 57 nt, Homo sapiens
aaagccaagaggaggacagcgcacacagcaagcacgagacagcgcacgaaacacaca

SEQ ID NO: 238926 - RNA, 77 nt, Homo sapiens
ggaccaggcagacgggaagaacccagaaagaaaggagcgccccaaaaggaaacaagacaagaccagccagcggcccc

SEQ ID NO: 238927 - RNA, 74 nt, Homo sapiens
gaagacaaagacaaccccccccagggcccgccgccgccagagccgagagcagaacacagcccgaggaacacgag

SEQ ID NO: 238928 - RNA, 32 nt, Homo sapiens
aaggaccaagaaccagaggaacccgaaggccc

SEQ ID NO: 238929 - RNA, 69 nt, Homo sapiens
ggcgcacaggcgcgagaaaggaaagaaacaaggcccagcggagacacaaaagcaccagcagaaccgccc

SEQ ID NO: 238930 - RNA, 78 nt, Homo sapiens
agcccagcagccgccaggccggccggagccgagcggaggccccagccccagccaaaccccccacacgaaccagcaagg

SEQ ID NO: 238931 - RNA, 67 nt, Homo sapiens
caccacaagagaagaccgcccaagcgcccggaggcccacagcagggggcagcaggacaagcggcaga

SEQ ID NO: 238932 - RNA, 83 nt, Homo sapiens
aggaaggaacaaaaggcccggaccccccggacgacggggcgggaccggcgccaccgcaggaagggggagcaacagacaagccc

SEQ ID NO: 238933 - RNA, 71 nt, Homo sapiens
aaaacccaaaccaacgcaaaaacggacgaaaaggggacagaagaggaagaagggaaaaaccaaaaaaacaa

SEQ ID NO: 238934 - RNA, 39 nt, Homo sapiens
caaccacaccaggcaaggaaaagaagacacggacaacac

SEQ ID NO: 238935 - RNA, 77 nt, Homo sapiens
cgggcgcccaagcgacagcgcagaggggcaggagccgggagccaccgcgaaggccaagccgacgccagcgggcgcca

SEQ ID NO: 238936 - RNA, 52 nt, Homo sapiens
ggaaccaccaccacagacccagacaggcgaagcgcgaaagaggcagaagaag

SEQ ID NO: 238937 - RNA, 77 nt, Homo sapiens
gggggggcacccccacaacggagccgacgaagaggcagagaccccggagcaacgaccccgcaaagcccgccagccca

SEQ ID NO: 238938 - RNA, 74 nt, Homo sapiens
agcacacagaacacacagcaaagaaccgacacagaaaaccggcaaaaaagcagggagacaacaacaagccgaag

SEQ ID NO: 238939 - RNA, 75 nt, Homo sapiens
aaaaagcgggcgaggaagaggacaacaccggagcgaaaccaggaaggcggacaagaaggacgcgggccggcaggc

SEQ ID NO: 238940 - RNA, 110 nt, Homo sapiens
ccgaaaggaggcaccacgcccggacaggacacgcgcagccaggaagccacagcagccaaggaaccaacggcccgggaccaccggcgacagcagaaagaaggaaaaaagcc

SEQ ID NO: 238941 - RNA, 73 nt, Homo sapiens
gaacccagagccaaaaagcggacacaaaaggacggacaggaggacaacgggaccgacacgggggaccgcggcg

SEQ ID NO: 238942 - RNA, 66 nt, Homo sapiens
ggcgccagcaagaaagacagagcaccaggagccggaaggaggcggccaaccagggcacggacgccc

SEQ ID NO: 238943 - RNA, 76 nt, Homo sapiens
cggccacccacgcccacggccaccgaagaggcaggacagaggccaggagcgccaaaacgaaaaccccaaggacaag

SEQ ID NO: 238944 - RNA, 82 nt, Homo sapiens
cggcgcgcgcggcgcgggacgcgcgcgggcacccacggagccccggggcggaggcaccacagcgaacacaacccccggggcc

SEQ ID NO: 238945 - RNA, 73 nt, Homo sapiens
aggaccgcgagacaaccaagcagacagaggggaagcggagcgacggacaccaggggcacagagagcgaagaag

SEQ ID NO: 238946 - RNA, 60 nt, Homo sapiens
aggcgccccagggacgagaggaagaccgaaggacaagggccgggaagaagaccacagaag

SEQ ID NO: 238947 - RNA, 52 nt, Homo sapiens
agaggaacaacaagcaggcaggcgacggacaggaagggccaaaggcaaagcg

SEQ ID NO: 238948 - RNA, 51 nt, Homo sapiens
cgggggcgagcggacccgcagccccaaaggaagaaagcacgggaaaaggcc

SEQ ID NO: 238949 - RNA, 59 nt, Homo sapiens
ggggggcaaacccgagagaacgggcggcaaggaagaggcccggaaagggaaaaaccgag

SEQ ID NO: 238950 - RNA, 88 nt, Homo sapiens
ggagagccgcgaggagcagcccgagaccaccgcaacagagcagcaccgcaagagcagggcagaacgggagcacggggaccagagcccc

SEQ ID NO: 238951 - RNA, 42 nt, Homo sapiens
gcccccgaggagcgcgggcgccgagcggaggcacccaccacg

SEQ ID NO: 238952 - RNA, 72 nt, Homo sapiens
aggagaagcaaagaagggaaaagcagcggaccgccccgggacaaaaaaaggaacagggcgagacgaacaacg

SEQ ID NO: 238953 - RNA, 72 nt, Homo sapiens
aacacaccgccaccgaagacgggccccaacacccagagacgaaagaaaaaggaggcggcaacagggaacgcc

SEQ ID NO: 238954 - RNA, 73 nt, Homo sapiens
gcgagcgccacgccaaggaggggcagagcccagaggcccggaaggcgcaaaagggggagaacaacaccaccaa

SEQ ID NO: 238955 - RNA, 82 nt, Homo sapiens
acaggggcggcgacggcgcaggcgaagcgaaacaggcaagaagagaaaggaaggaggggaaaagacaaacaccaaaagaagg

SEQ ID NO: 238956 - RNA, 74 nt, Homo sapiens
gaagccgcacgccgggaggaggaccagagcgggcggaacacgccgcgggaggcaagcgcagaccgccaagcgac

SEQ ID NO: 238957 - RNA, 79 nt, Homo sapiens
caaacacgcagcgcagacccaagacacagccagggcggaaacgcgcgccaagaaaagggaacgccgcagaaagaagaag

SEQ ID NO: 238958 - RNA, 71 nt, Homo sapiens
cccggggacccccgacgccaggcagcgcccccaaacgacagaagagggacaagccaagaaacccggaacga

SEQ ID NO: 238959 - RNA, 68 nt, Homo sapiens
gcagcggagaaacagaagggcacgggccgggaaagcggaacaggacagaaaggccagcagcggagagc

SEQ ID NO: 238960 - RNA, 81 nt, Homo sapiens
cagccagcaaggcagccagcaaccacaacaagggagcacagaaccaggcccacgaaacagagcaacaaggagacgcgccgc

SEQ ID NO: 238961 - RNA, 62 nt, Homo sapiens
ccgacaggaggaagaacaccacccgcaagggcaagaacacggagaacacccagcagaggcgc

SEQ ID NO: 238962 - RNA, 44 nt, Homo sapiens
caaacgggcacgaaaaccaagaagcgagagaaaaggaacagccg

SEQ ID NO: 238963 - RNA, 36 nt, Homo sapiens
gcccgacaaagcccccaagagagagaggggcacagc

SEQ ID NO: 238964 - RNA, 83 nt, Homo sapiens
ccacaggccgggacccggagggcgagaagcaccgcccaagccagacagacacagcacagcagccacgaagagcaaagcaagcc

SEQ ID NO: 238965 - RNA, 87 nt, Homo sapiens
cccgccagcagccgccggagccagccaacgagcgggaacagaaagaacagccaaaagagaaagaccgggcgagccacagaggcgacc

SEQ ID NO: 238966 - RNA, 70 nt, Homo sapiens
ccccaaggcacaacaggagaccaggaagaccagaccaggcgcaggggggaccacggcaaaccagaacgaa

SEQ ID NO: 238967 - RNA, 72 nt, Homo sapiens
agaaacagcccagagaaccgcccggaccacaaaaaccaggagaaggcgggaaggaaaagaaaaccaagggag

SEQ ID NO: 238968 - RNA, 63 nt, Homo sapiens
cggccgccgcgcccggagcaagacacccgacgggagcgcacagagagaaccccacccaagaga

SEQ ID NO: 238969 - RNA, 73 nt, Homo sapiens
aagacccagacccgcccgccagaaccgcgcgccacccacaaccaggcaccccgagccccggagcgagagcgag

SEQ ID NO: 238970 - RNA, 73 nt, Homo sapiens
agcaaggaggccgcaaagggcacgaagcaggaaagaacgacgccagggaggcaagaaagcgcaaggggaacgc

SEQ ID NO: 238971 - RNA, 39 nt, Homo sapiens
ccccaaaggcgggagcaggcaccgcgagccacgaggaag

SEQ ID NO: 238972 - RNA, 77 nt, Homo sapiens
accgaagaacagaaaacgcaaggagaaacccaagagcagcggcaggaccagaccgggggaggaacgccacaaagacg

SEQ ID NO: 238973 - RNA, 76 nt, Homo sapiens
ccgggacccggccccggcccacaggggggggcaaacccgagagaacggggggggaacgagagaaaaaacaccaggg

SEQ ID NO: 238974 - RNA, 77 nt, Homo sapiens
cagggagacacaggccagaacacagcccacggacaggaacgaacaagaccccggcacgggccccgggcggggagcgg

SEQ ID NO: 238975 - RNA, 76 nt, Homo sapiens
ggggccccaagaagccgagacacgcggaggcagcacggcaggagacgaggagaggacagcaggacacccggacccc

SEQ ID NO: 238976 - RNA, 78 nt, Homo sapiens
agacaacacggggacaaccaagaggaaagcgaacgcgaaaagaaaagccgagagcagccagaccggcgaagaaagaac

SEQ ID NO: 238977 - RNA, 77 nt, Homo sapiens
agagggacggaaccaccagaagccagcccccaggcggaacgcccgccccgcagagaggaaaccgagccacgagagaa

SEQ ID NO: 238978 - RNA, 55 nt, Homo sapiens
aagaaacaccaccaacaaaccggcggcaaagacgcaacaacagcgagcaagagag

SEQ ID NO: 238979 - RNA, 70 nt, Homo sapiens
cggcgcgggacgcgcgcgggcacccacggagccccggggcggccacgcgcgcccaagcacaaggcccgac

SEQ ID NO: 238980 - RNA, 68 nt, Homo sapiens
gagaacaccagagaaaacaccaccaggccccggccccagacgcggccggagcccccccagacacacga

SEQ ID NO: 238981 - RNA, 76 nt, Homo sapiens
ccacgaacagcggagcaaggcgacgaaccggagagaggagaacgaacaccggaccgccagaacccacaggagggcc

SEQ ID NO: 238982 - RNA, 70 nt, Homo sapiens
gaagccggcacagcccaggaggcacggaggccccagcccaacccagcccaggaggaggagccagaacgcc

SEQ ID NO: 238983 - RNA, 76 nt, Homo sapiens
cccgcggaccgcagagcaccccaggaaccgaggcagggagacccgaccaccggaagccacggcccggacccccgcc

SEQ ID NO: 238984 - RNA, 88 nt, Homo sapiens
aacggacagcgagaagaagagcaacgcccacgaggcccgcaaaggcacccgcacccacaccgcggggcggaacaacgcgcgccagccg

SEQ ID NO: 238985 - RNA, 85 nt, Homo sapiens
ggcggggagggggccagccccccaggcccccacccccgagaagagcgaaagccagggggcgaaacaaaacaaaaaggagcaaaag

SEQ ID NO: 238986 - RNA, 55 nt, Homo sapiens
aagaaggagaacaaaagcaaagccccagacggacggaagaaggagagacgaccac

SEQ ID NO: 238987 - RNA, 72 nt, Homo sapiens
ccacggcagaaggggaagccagcaacgcggaaggaacaggaggcccggacccccagcacaagcgcaggccag

SEQ ID NO: 238988 - RNA, 77 nt, Homo sapiens
ccccccgccggccgccccggcccgccggacccacggccgccccggagcccgacgcggcaaaggaacagagcacacag

SEQ ID NO: 238989 - RNA, 66 nt, Homo sapiens
cgccagacacggcaaaacaggacggcgaacacgaccagaggccaggccacacaagccccagccaaa

SEQ ID NO: 238990 - RNA, 61 nt, Homo sapiens
ggaagcagaggcgagccacacgcagggacccgagcgaccagaaagccaacggcccacggcc

SEQ ID NO: 238991 - RNA, 79 nt, Homo sapiens
ccagccccgaagggcacaccggaggggaaggaacaaagcagagaaaccaaaaggccagacgaacacgagagggagcgaa

SEQ ID NO: 238992 - RNA, 42 nt, Homo sapiens
cggcagcagggcgggagcacggaagggacgcgagagaaaaga

SEQ ID NO: 238993 - RNA, 97 nt, Homo sapiens
ccagccgccagggcgcaccaagacaagaagacaggcccggacgcccccagcaccggacggggaaacagaacgagcacagagaacaagacccggaagg

SEQ ID NO: 238994 - RNA, 81 nt, Homo sapiens
cacgggcaaggcggagaggacggagcggcgagcccccgcggcgacagggagaaggaaaccggacacaaggcaccgcacgag

SEQ ID NO: 238995 - RNA, 50 nt, Homo sapiens
ccaaggacaccccaagcaggccccccagccccagcgcgcgcgccaggagg

SEQ ID NO: 238996 - RNA, 76 nt, Homo sapiens
ccgccgaccccccggcgccgcgccggcggcgggaacggcggccccagcacgcacacgggaagccaccagccagaag

SEQ ID NO: 238997 - RNA, 55 nt, Homo sapiens
cagcagccgcgaccgcgcagcgggaaaggggcccagacagcggagcagcgcaagc

SEQ ID NO: 238998 - RNA, 60 nt, Homo sapiens
aggacacaagggcgaccgggggaaccaagacgccaacgggacagccaaagaccggagcgg

SEQ ID NO: 238999 - RNA, 65 nt, Homo sapiens
cgaaggcaaagaccccagcaccacagaaaaaagggcgacccaccaacaggcaacccagacaaaga

SEQ ID NO: 239000 - RNA, 67 nt, Homo sapiens
aggacgacagccggaggcgaagagcaaagacaacggcaagcggagaagagcaaggccgaaccgagag

SEQ ID NO: 239001 - RNA, 85 nt, Homo sapiens
agcagcggcgggggcccgagggaacacaccgccggggagccagaagaggaggaagcgaccggccaacggccacccccaagccaag

SEQ ID NO: 239002 - RNA, 102 nt, Homo sapiens
gccagcacgccacccccgggaccggaggggcgcaagcagaaagcgagaaaaaaaagcggggaaaacaaaaaaaagaaggagggaagagggggccaggaccag

SEQ ID NO: 239003 - RNA, 80 nt, Homo sapiens
cagcgcaggaggacgaccggggggcaggaggcacccggggcaggaaaagaaaagccaaccaagaccccaaaacggagcgg

SEQ ID NO: 239004 - RNA, 78 nt, Homo sapiens
ggcccgagcagccagaccgacccacccgcgcggggaccggagaagggcgggaaacaggcggaggcagaggacgccgga

SEQ ID NO: 239005 - RNA, 78 nt, Homo sapiens
ccgccagcagccgccggagccagccaacgagcgcagggcagaaaagaacagacccagaagaagcgaaaggggagaaag

SEQ ID NO: 239006 - RNA, 56 nt, Homo sapiens
agccaccgggaccccaggcggcaggccgaggacagcgcgggagccaggaaacgcag

SEQ ID NO: 239007 - RNA, 75 nt, Homo sapiens
caggaccgaaggcccgccacgcccgggaacaagccgcaagaccgaaaacccggcaccaaggaccaggcacaagcg

SEQ ID NO: 239008 - RNA, 80 nt, Homo sapiens
aaacgagagggacgacggcccggcggaagaccagagaccgaggaagagacaaaaagaaagcagccgagcaggaaacccag

SEQ ID NO: 239009 - RNA, 73 nt, Homo sapiens
agcaaacccacccagcacaccccgcgaaaggaggaggcacagaagggcccggggagacgcaccgcgcagacgg

SEQ ID NO: 239010 - RNA, 60 nt, Homo sapiens
gagaaggcggcccaccccagagcaccggcaggaccaagaaaggcccagggaccaaagccc

SEQ ID NO: 239011 - RNA, 69 nt, Homo sapiens
caccagcacaagaccgaggaagggaagcgacaagcccacgagacgaacccccagccagcacacgcgaga

SEQ ID NO: 239012 - RNA, 72 nt, Homo sapiens
ggaccgcacacggagaaggaagcccccgccccgccgagcgcagggcggcccgacgccagcgccagcaccgcc

SEQ ID NO: 239013 - RNA, 79 nt, Homo sapiens
gaggaggcggaggggacgccgcaccacggaaaaggaaggacccccacacccccccaaggagacccacacaacgagaagc

SEQ ID NO: 239014 - RNA, 66 nt, Homo sapiens
cccccgccacaggagcaaaagaggggcagcaccacacggcaggcgaccacaaagcgaagacaacac

SEQ ID NO: 239015 - RNA, 80 nt, Homo sapiens
aggggagccggcaggacggaaggggaagaggcccacccggagaaccccacggagaaccagagggggcccagagagggccg

SEQ ID NO: 239016 - RNA, 76 nt, Homo sapiens
acgacaggaggcaccggagcgccaacaggcccaggcccccgacaagccccgcgggcccacccgccaagcaccccag

SEQ ID NO: 239017 - RNA, 71 nt, Homo sapiens
caagcacggaaagagacagcgacggcaaaagcgcaaccagggagcagaagaagccaccccaggagagccaa

SEQ ID NO: 239018 - RNA, 61 nt, Homo sapiens
agaagagcagaaaacaacacgacagccaggcagggaccccgacggagagacaaagaagacg

SEQ ID NO: 239019 - RNA, 82 nt, Homo sapiens
ccaaacagaggcgacccagccacccaacaggcaaaagcagaccggaaaacccaccggcaagaccacacccgaggggagccca

SEQ ID NO: 239020 - RNA, 73 nt, Homo sapiens
cgaacggcgaacaagagcaacgaggggaagcggccgcggccggcagagccagaggacacccccccgcagcgga

SEQ ID NO: 239021 - RNA, 58 nt, Homo sapiens
ggcaccgaggcaccagaggaggaaaggagagaaggggcaaacccaagaggaaggcgcg

SEQ ID NO: 239022 - RNA, 84 nt, Homo sapiens
cggccggaggcagcgagaaagcgcagccaggcggcgccggcgcccagggacgccggagccccaggcagcagagaccacacggcg

SEQ ID NO: 239023 - RNA, 67 nt, Homo sapiens
agccgcggcggcagcagcaggagagaacccagcggggccgccccacccgaggcccaccccaacgagc

SEQ ID NO: 239024 - RNA, 84 nt, Homo sapiens
aaaaaccgaggaaggagagggaccggaccagggggagcccggcccagccccccaccccccgcccccccgagcgaccagggccgg

SEQ ID NO: 239025 - RNA, 66 nt, Homo sapiens
cccagcaccacagaaaaaagggggacacccacggccaaccaaaaaccgggaacagagaaacaagca

SEQ ID NO: 239026 - RNA, 69 nt, Homo sapiens
cgcgaaacgcacgagaaggccacaagaccccggagagggggaaacagaaagcgccgggcggcgaaaaag

SEQ ID NO: 239027 - RNA, 81 nt, Homo sapiens
cccagaaacgaccgcaaaggcacccggggcagaccggaccaagccccgggcaaggggagcagacaacaaaacgagcaagca

SEQ ID NO: 239028 - RNA, 59 nt, Homo sapiens
ccacccgacccagagcccccgcccgggaaagggagcagcaccggccacacccacagcac

SEQ ID NO: 239029 - RNA, 67 nt, Homo sapiens
gggcccgcccggagcgccggccgcgcaggggcaagccgaaccggaaccggagaccccgacagcaacc

SEQ ID NO: 239030 - RNA, 36 nt, Homo sapiens
acaggaccccacgcaaaacagcgaaacgacaaaggc

SEQ ID NO: 239031 - RNA, 72 nt, Homo sapiens
ggaaacgaacaaacgcacggagcgcaacacgagggaccacggaaaaggagcagcgagaacgagcgacaagac

SEQ ID NO: 239032 - RNA, 41 nt, Homo sapiens
ggccagaggagaagccaaagacgcgaccggaaaggagagag

SEQ ID NO: 239033 - RNA, 60 nt, Homo sapiens
aaaggagcggcaggcgcaggcagccgacgaagagggggggcccaggacggaaaacagcaa

SEQ ID NO: 239034 - RNA, 91 nt, Homo sapiens
ggcgcgcagaacccgcgggcaccgccgcgggagcgccgccaagggcgcggcccaaaacccaggcccccgcgccaccccccgcaccacgcca

SEQ ID NO: 239035 - RNA, 73 nt, Homo sapiens
aaaaccggcgagaaggaccaggacgccaagggcagcaaggcagaagaagagcgcaacaaaacaacgagcagag

SEQ ID NO: 239036 - RNA, 65 nt, Homo sapiens
gcacggcccaggcccgcagagcccacggggaaggacgggaacacaggaaacaagcaagcccaaaa

SEQ ID NO: 239037 - RNA, 33 nt, Homo sapiens
agagagacaccgaaacaggcaccggagagcgaa

SEQ ID NO: 239038 - RNA, 121 nt, Homo sapiens
gccgagcccgcgcgccaggccgcggcccgaggcgcagcagcaggaggaggaccgcagcaagcgcaaagccgaaaaacagcagcagaggaaagaaaagaccagagcaagggacccgaacaag

SEQ ID NO: 239039 - RNA, 93 nt, Homo sapiens
ccaacgcccccccagcacacagaggagagcgacgagaagaccgaagaacggcaaagagaaaagaagcagaaaaaacaggaaggagaaacccga

SEQ ID NO: 239040 - RNA, 93 nt, Homo sapiens
gagagaccgccggccgagggggcccaggggcagcgagcaagacagcaagcagcccccgggcgcgccggacaggccgccgcggcgggacagcgg

SEQ ID NO: 239041 - RNA, 75 nt, Homo sapiens
cggggagggggaccgcgaggagcgcagccgcaaggaagaagacggcacgggacccccagcacaggcagcaggccg

SEQ ID NO: 239042 - RNA, 72 nt, Homo sapiens
ccaccaaggagggcccgaccaccacccacagaacccgcaagcccccaaaggacccagcagccagcgaagccc

SEQ ID NO: 239043 - RNA, 80 nt, Homo sapiens
agcacaagcacgaaagccacaaaaggggagaggcccaggaggacaggacccaccaacaaccgaaaacaggggaacagaag

SEQ ID NO: 239044 - RNA, 85 nt, Homo sapiens
gccggccccacgggccggggcggagagaagaccagccccaggcagaacaaccgggagggcggagcaggggagcgaggcacaggag

SEQ ID NO: 239045 - RNA, 64 nt, Homo sapiens
gccaacacacgcaaagcagagaaagaaaccagcgaacgacggcagcacacagccagaacagaga

SEQ ID NO: 239046 - RNA, 68 nt, Homo sapiens
cccccaccccgcccaaggaggcccagcggaaagacaaggccccagcagcaggcaaagggaaggcacag

SEQ ID NO: 239047 - RNA, 74 nt, Homo sapiens
gagcgacgcgcccacccgacaaagggccgagggccagcagaagggaagcaccaaaaaaagaccagaagaaggac

SEQ ID NO: 239048 - RNA, 41 nt, Homo sapiens
gcagccgccaccgagacgaggcgcaaggaagaagagacgcc

SEQ ID NO: 239049 - RNA, 86 nt, Homo sapiens
aagaggcaaaggggaggacgcagcaaaccaccagaaggacagcggccgaagccagagccggggcggcgccaggccccacacgggcg

SEQ ID NO: 239050 - RNA, 76 nt, Homo sapiens
ccagagcgcggaagaagacagcccaagagccagagacacggagaggcaaggcagcaaccaccggagggcgcagaga

SEQ ID NO: 239051 - RNA, 73 nt, Homo sapiens
gacacggaggaaggaaaaggagaccgaggaaaggcagacgggcggcagagaagagaagagcacagcgggagga

SEQ ID NO: 239052 - RNA, 72 nt, Homo sapiens
agcagccagcacaacccagccacagccggcggaagaggaccaagaagggggcagcgcgggaaccagcgaaaa

SEQ ID NO: 239053 - RNA, 84 nt, Homo sapiens
gaagaccgagcaaagagaccccggaacgagaaagaagaaacaaagagggacccagccaccaaaaggaggcgaagggccaggaga

SEQ ID NO: 239054 - RNA, 70 nt, Homo sapiens
gcgagacccgaagcagcgccaggaaagagaggagcgagaggaagcggaagaaaaccaacaaaggacagcg

SEQ ID NO: 239055 - RNA, 77 nt, Homo sapiens
caccaggcccagggccggcccccccaggacaacccagaggcaacaaaggcgaggccgacgcagccccgcccaccccg

SEQ ID NO: 239056 - RNA, 89 nt, Homo sapiens
agagcggggagacgccagacaacacccaggcagaagcggaaagagagagcacaggaaggagagcaaaaacgacaaagaagccgggaaag

SEQ ID NO: 239057 - RNA, 48 nt, Homo sapiens
cgagagcacagcaccggaccaggcgggcaggggcacggccaggcagcc

SEQ ID NO: 239058 - RNA, 39 nt, Homo sapiens
cgcggcgcgcagcccagcagacccgggaagaggaagacc

SEQ ID NO: 239059 - RNA, 58 nt, Homo sapiens
ggcggggaggcgaggccggacgcacccggggggcccagagcaaaccaggaaccccggg

SEQ ID NO: 239060 - RNA, 74 nt, Homo sapiens
gagaaccgaaacaagcccaggaacggcacgcagcgagaacgcgcacgaagagggagaggagggaagacccgggg

SEQ ID NO: 239061 - RNA, 73 nt, Homo sapiens
gcgccaagaggccggagagaaacgcggaggagaaagccccgggcacgcacggcggacacagcagaacccccgg

SEQ ID NO: 239062 - RNA, 59 nt, Homo sapiens
ggacccagccaggcagaccccgggcagcaggacaagcagaccggaagaccgacggaaga

SEQ ID NO: 239063 - RNA, 68 nt, Homo sapiens
aacggaacgccacacagaggaaagcacaaaggaagacgaaccggagaagagggaagcaagacaagaac

SEQ ID NO: 239064 - RNA, 76 nt, Homo sapiens
aggggcgcgcggagcgcccgggccccagcagggccagagaccacggaagccccggagaacgggaagggagaccggc

SEQ ID NO: 239065 - RNA, 71 nt, Homo sapiens
ccagcggagaggcccagcacagggcgccagcccgaggagcccggcaaccgccagacaacgagaccaagaaa

SEQ ID NO: 239066 - RNA, 80 nt, Homo sapiens
gcggaaggcagcgcccagcagcgcaggacccccgcagcaaacacaagaagaccacacgacccagccccacgggaccacgg

SEQ ID NO: 239067 - RNA, 63 nt, Homo sapiens
ccaggcgaagaagcgcagccgcaccggccaagggggccacgaccaggcagcgagacccggcag

SEQ ID NO: 239068 - RNA, 67 nt, Homo sapiens
ccaccagagcagcaacaaggcagcgccaacgcaaacacagcagggggacacacacacccgagagagc

SEQ ID NO: 239069 - RNA, 58 nt, Homo sapiens
acgcagcggcagaaacaaggcgcaggaccccccagggggcccgagcccaccccaggga

SEQ ID NO: 239070 - RNA, 50 nt, Homo sapiens
gaaaacccagagacgcaaagcgacaagcccccagaaaaggccgacacgaa

SEQ ID NO: 239071 - RNA, 79 nt, Homo sapiens
caccaggcaagagcggaaagacaccagccccgccagacaacccgcggggggccaagggggaaaagagaagagcaacacc

SEQ ID NO: 239072 - RNA, 74 nt, Homo sapiens
cggacaaaagggagcaccgacacgaggaacagcagcgccggccacaggcacacggcgaacgacggggaccacca

SEQ ID NO: 239073 - RNA, 82 nt, Homo sapiens
cccgcccagcccccaacgccagcccgcaggcccagagccggcagaacccccaacgagcgggacagcccaacagaaggggaag

SEQ ID NO: 239074 - RNA, 73 nt, Homo sapiens
ccgccccgagccagcgcgccacccacggcgcaggccccgcgcccggggggagacggggcacgcccagagcagg

SEQ ID NO: 239075 - RNA, 63 nt, Homo sapiens
ggcgcaggcccacggagcgcagccgccgaggaacaaaacaggaagcggaaaacagaaccacag

SEQ ID NO: 239076 - RNA, 68 nt, Homo sapiens
gaaacgacacgagcaaaaacgggggggaaaccgaggaaccaagcgaaacgggagacgggcgcgacggg

SEQ ID NO: 239077 - RNA, 48 nt, Homo sapiens
cagacgcccgacccacaccagcgaacgaaggggaccagagcagaaaca

SEQ ID NO: 239078 - RNA, 81 nt, Homo sapiens
aaaacacgggcggacggaacgacgccaggaacccgccaccgccaccggccccaggcccacaacccagggggggccccagca

SEQ ID NO: 239079 - RNA, 70 nt, Homo sapiens
acggcggggccccccgggcagagaagccaacaaagaccagaaaaaaccaaggaccaaagaagccccgccc

SEQ ID NO: 239080 - RNA, 76 nt, Homo sapiens
caacaagccccagaaccgcagcacccggccacagcgcacagcagggaacaaaaaacccagaaggggagaaagaaca

SEQ ID NO: 239081 - RNA, 71 nt, Homo sapiens
gaagccgaggagcgaaagccacccacaaacaaacacccacggaaccagagacggagaacggcagaaccaag

SEQ ID NO: 239082 - RNA, 73 nt, Homo sapiens
ggggcccgcccagaacagaagaggcccgcccaagagccaggacggccagaaagaccccgacagaacgacacag

SEQ ID NO: 239083 - RNA, 54 nt, Homo sapiens
gggaggaacgggggagcccacaggagccaggaccagaacagagaagaaagcagg

SEQ ID NO: 239084 - RNA, 59 nt, Homo sapiens
cggaacgaagaaaagaaaggccaagaccaggaaaggaagacagacgcccaaaggacggc

SEQ ID NO: 239085 - RNA, 73 nt, Homo sapiens
aagagagagagggagaagaagcaaaaagagaggagaagcgcacggcagaacaagaagggcaaccaggggggaa

SEQ ID NO: 239086 - RNA, 68 nt, Homo sapiens
gaagcaaagaccaaacagaaccaccaggacggccaggaacagccacggggacaaagaaacaccaaggc

SEQ ID NO: 239087 - RNA, 74 nt, Homo sapiens
gcgagcgagggggggcgcgccggaaaccggagcgcgcagcagggaggcccaggaacacaccaccaggaaaagcc

SEQ ID NO: 239088 - RNA, 74 nt, Homo sapiens
gcggagaaaaggaaccggccccgggaagaaggagaaagacaaagccccgagaaagaccagcaccgccgaaaagc

SEQ ID NO: 239089 - RNA, 77 nt, Homo sapiens
cggccagggccgaggcaggccgacccggggccgggcagcccgcgcgaccggacgaaaaggcccaggccggcggaaaa

SEQ ID NO: 239090 - RNA, 69 nt, Homo sapiens
ggcgggcgccccgcgcggagggaagggggcccgaccgagggagggacagcgggccccagaccggggagg

SEQ ID NO: 239091 - RNA, 73 nt, Homo sapiens
gggacaagcagcaaggcgcggggggccacgcgaggccgaggaagcacagcagaggaaaggcacccggcaggcg

SEQ ID NO: 239092 - RNA, 76 nt, Homo sapiens
gacggaggacacagaggcccagaggccaagcggcaaagggggaccggccaagcagagccaagagcgggagaacgca

SEQ ID NO: 239093 - RNA, 87 nt, Homo sapiens
aagcaggccgaggcacagcccgacccgccaggagcagccgaggaaggcggggaggacggcacgcccgcagacgcgaaaagagaaccg

SEQ ID NO: 239094 - RNA, 74 nt, Homo sapiens
gacaaaaaacaaagcaaaaaaaacaggagaaaaagacgaggcccccaagcggggggcagccaagcaggaccacc

SEQ ID NO: 239095 - RNA, 69 nt, Homo sapiens
caaacacaaccaggaccgaagcccgcaaaggaacggcaaacccgaaaacaaagcacgaagcaaaaagac

SEQ ID NO: 239096 - RNA, 75 nt, Homo sapiens
gcgccgccccgcgcgcgagccacgcagcccccagccagcgggaccagccgcagcaagccagaagaacaaaaaacg

SEQ ID NO: 239097 - RNA, 74 nt, Homo sapiens
cggcgccgaccagcggcggcgacgcgcaagcagggagagcaacaagccccggccccagagccagccggagagcg

SEQ ID NO: 239098 - RNA, 76 nt, Homo sapiens
agacggacgaaagccagagaaaaagcggagaaaaggcacggcgacaaacgggccacaaagcacggaacgaaaacga

SEQ ID NO: 239099 - RNA, 69 nt, Homo sapiens
gggcgcgacacaagacagacaaaccaggaaccgaccagcaagacagaagacgacaaccggaacgggaca

SEQ ID NO: 239100 - RNA, 75 nt, Homo sapiens
agggccaaagaagggagagagcaaacaagcgaaaaacagacaagaaaccgcagagcggaaaaaaaggaaagagag

SEQ ID NO: 239101 - RNA, 68 nt, Homo sapiens
gccaggcaccccccacagaaagggcgggccggccaacaaaagcccgggcggacgcaaggccacgggaa

SEQ ID NO: 239102 - RNA, 66 nt, Homo sapiens
cggacccgacaccagaacgagggagggaacgcaaagaccggaaaggaagacacccagcagcagaag

SEQ ID NO: 239103 - RNA, 69 nt, Homo sapiens
gggaaaacgccggccgaacagcccacgccaaggaccgagcaccgagacagaagacacccaagagacgga

SEQ ID NO: 239104 - RNA, 78 nt, Homo sapiens
aagaacacggaacagaacaacccagaacggaagccccccggaaaagcaagagggacagggaggacccagaagaggccg

SEQ ID NO: 239105 - RNA, 86 nt, Homo sapiens
gaggcagagccgccccagcagcaggggcgccagcccgaggacgaggaggacgaggagccggcgcggaggagcggaacagcgcgagg

SEQ ID NO: 239106 - RNA, 78 nt, Homo sapiens
acgcgacagagagcgcagagcgaaagcgcaggcaggagaaggacagcagagccacaagggacgcaaaaagaaggggga

SEQ ID NO: 239107 - RNA, 85 nt, Homo sapiens
ggcgagaggcacagacgacacacgaaaccaccagaccaccaccacacgcacacaccaaaaacaccccaccagaccacccagcaag

SEQ ID NO: 239108 - RNA, 85 nt, Homo sapiens
ggcaggaccaaggagccacagaggaccgacgcgcgcaggcagaggagaaggcagcggacaaagaggaagcggaggaggaagaagc

SEQ ID NO: 239109 - RNA, 73 nt, Homo sapiens
cacaacaggcagacagacaacacaagcccaccgacgggggacgacaccgacggggagaggcaagccacaaaag

SEQ ID NO: 239110 - RNA, 79 nt, Homo sapiens
agaaaggcggggaagaagccacccgccaggaggaagaaagcgggcaaaaggccgccgagggaagacacacaggaaggga

SEQ ID NO: 239111 - RNA, 37 nt, Homo sapiens
gaccacgacaagagagagggggcggcaccaaccggga

SEQ ID NO: 239112 - RNA, 77 nt, Homo sapiens
gggaccaccccgcgccccgccagcaccggccccaccacaggccacccaggccgggagggacaccaaaaggaagcggg

SEQ ID NO: 239113 - RNA, 67 nt, Homo sapiens
cagaggcgaaaaagagaaggaacggaagccaaagcaaggcgggcaacacaacaaggcgcggacaccc

SEQ ID NO: 239114 - RNA, 114 nt, Homo sapiens
aggaaggccccggccccagacgaggaccaggccgggaggaggacaacacccaacagcacagggccccccaacgggcgaccagggcccgacccgcgacggcgggcgcgaagggcg

SEQ ID NO: 239115 - RNA, 49 nt, Homo sapiens
ggacgccagccgcagaggaagacccgagagggacaccagcaccaggcgc

SEQ ID NO: 239116 - RNA, 75 nt, Homo sapiens
aggagaaggcgcggccccgccagccacacggccccggcaaacccccaccagcccagcgagacgacgggaccgaag

SEQ ID NO: 239117 - RNA, 54 nt, Homo sapiens
cccacgaagcagacccagagggcggcgaaggcgcgccacggagccacccaagcg

SEQ ID NO: 239118 - RNA, 84 nt, Homo sapiens
ccaaagacgacgcaaaaccgaaagagggcaagagaagaacagaagaaacaaaaggccaccgaagagaagaagagaaaccgagcc

SEQ ID NO: 239119 - RNA, 74 nt, Homo sapiens
aggggagaacaccgaagcccccacaagggaagaaccacagccgggagagagcgcgaaccggaaaaagaacgacg

SEQ ID NO: 239120 - RNA, 74 nt, Homo sapiens
agggaagcgcagccaggcccggagacacacgccagggggggcgccagaaagccgagccgggccagcccacacac

SEQ ID NO: 239121 - RNA, 77 nt, Homo sapiens
gcgaggcacagggaaagggcggccagacccaccacagccaacggcacagcgaggcagccaacccagagaagcagacg

SEQ ID NO: 239122 - RNA, 80 nt, Homo sapiens
cgacggagcgaggggcaggccggccacgagagaagaaagaaaaagaaaccgccagcccagagacacgaaagggacagaga

SEQ ID NO: 239123 - RNA, 75 nt, Homo sapiens
cccagacccgggggagggacagcccaccggaacggggcaggacacccagagcccggaaaaaggacagccaccgga

SEQ ID NO: 239124 - RNA, 53 nt, Homo sapiens
aaaagggccaaagaagggagagaggcacaaggcgagaagggaaggcaagagac

SEQ ID NO: 239125 - RNA, 81 nt, Homo sapiens
ggagcagccagaaagcggcacgaacagagccgggagcaagaagaacacccagagccacaaacccccccacgacaccgaagc

SEQ ID NO: 239126 - RNA, 81 nt, Homo sapiens
ccagccagccacgcgggccgcccgacggcggccaccggccagaggggggcgcccgcaggggcgacagagcacacacgaacg

SEQ ID NO: 239127 - RNA, 70 nt, Homo sapiens
aagggcgcagcagaaagcaaaccagcaggcaccaaggaaagcagaagacaaaccaagaggggggagaccg

SEQ ID NO: 239128 - RNA, 77 nt, Homo sapiens
gcgacagccgaggagcggacgcccaggaccggaacagacgaggggcaggggaggggaagcagcaagacggaggggga

SEQ ID NO: 239129 - RNA, 73 nt, Homo sapiens
aagacacagaggcaaaaaagaggaaaaagggggcagaaagaaacggaagaaccgagagaaggccgcaggagga

SEQ ID NO: 239130 - RNA, 59 nt, Homo sapiens
cccggcccccccacgcacaggccggaagggcaccccacagcaagaccgagaagaaaccc

SEQ ID NO: 239131 - RNA, 76 nt, Homo sapiens
ggaagaccagaggaagcgacagagagaggcaggacacagaagaacgcagcccggggagcagcaccccacaggcacg

SEQ ID NO: 239132 - RNA, 79 nt, Homo sapiens
cggccccggccgggagcgccggggccaggagagcgcgccggcgagaagcggccgagccagcagcaggacggagccccac

SEQ ID NO: 239133 - RNA, 77 nt, Homo sapiens
aacacacaaaaagaagcccgacagggcccacccagcgaaagacaggaagagcacccaagcgcaagcaaaagaaggcc

SEQ ID NO: 239134 - RNA, 71 nt, Homo sapiens
gccagcccgacgccagggagaccgagcaaggccgagaggaaagcaagggagcagagaccccacacccagcg

SEQ ID NO: 239135 - RNA, 73 nt, Homo sapiens
gaacaaaagaagccaggacccagccgcaagcaagaggccaggacccgccaggggacgaaccaaagcaaaccac

SEQ ID NO: 239136 - RNA, 75 nt, Homo sapiens
cgacgcaggaagccaccgagacggcgaccgggcgccgagacaccagagccacaagagcccaaaaggcagagcgag

SEQ ID NO: 239137 - RNA, 74 nt, Homo sapiens
agagccagccccaaccgaacccagacgcagaacggcgaagcaaaagccaggacgaaaaagacaaagagccaccc

SEQ ID NO: 239138 - RNA, 71 nt, Homo sapiens
gaaacccaccgggaaaaggcacgaaggagggacagaaaacaggagccaaccgccggccacccccagcagcg

SEQ ID NO: 239139 - RNA, 68 nt, Homo sapiens
agaaggcagccccgaaccagcaccacagaaggacgaagagcgacaggccacagagcgaaaaaaaccaa

SEQ ID NO: 239140 - RNA, 66 nt, Homo sapiens
acccaggaacaaaccgggggcaaggccaaaaagaagaggggaaagaaccagacgacaggaaggcac

SEQ ID NO: 239141 - RNA, 76 nt, Homo sapiens
cgagcacgggcggagcgaacgggaaagcacaaggcagggaggagaaccccaagagcaccaaaaggaaagagagaaa

SEQ ID NO: 239142 - RNA, 52 nt, Homo sapiens
gaccggaacagcacacacaccaccaaccacagacaaggaccacagagcagga

SEQ ID NO: 239143 - RNA, 82 nt, Homo sapiens
ggaggaggaaccggagaccccgaaaacggaagcgcagggagaaggaagaggggaaaagggcgagaagagacaaacagaaaac

SEQ ID NO: 239144 - RNA, 79 nt, Homo sapiens
gaggagcggacccccaagacaggaccgcagaacagccaagagcgggcccgggccaaccgaggggcaccaggaggcccag

SEQ ID NO: 239145 - RNA, 56 nt, Homo sapiens
cccgagagcgggagcaggaggaagaagacagaagagcccgcgaacggaagcggagc

SEQ ID NO: 239146 - RNA, 77 nt, Homo sapiens
ccacagcgaagaccagaggaggggcgaagaggaagcccaccgccaccgaaaggaccagcaagaaggaagagcaagca

SEQ ID NO: 239147 - RNA, 60 nt, Homo sapiens
gaaacggcccaacgagaagacgcgaaggccaaggacgccgggcggcgggaacgcccgcgg

SEQ ID NO: 239148 - RNA, 78 nt, Homo sapiens
agaccagcgacccgagacaggaaaccgaggggaaaagcaggaaaaagaaggaagccaacgaacggaacgaagaagaca

SEQ ID NO: 239149 - RNA, 71 nt, Homo sapiens
ggcgcggggcggggaggcggggaaaaaaggccagagacagacggcacagacggagggaagaccacagaagc

SEQ ID NO: 239150 - RNA, 84 nt, Homo sapiens
ccgggcgcgcggcgccgccacaaggcgcgccgcgacgaggagcggacgagagaaaaaggccaggagaagagggcgaaacaacaa

SEQ ID NO: 239151 - RNA, 67 nt, Homo sapiens
gcggcccaacggacgagcaaccacaggcagggccagaggcgggaacgaagcccaaaaggcagagacg

SEQ ID NO: 239152 - RNA, 83 nt, Homo sapiens
cgagagggaggaaagggaggcaagaaggaagcagggagaccaaagaggaaggggaccaacacagagggagaaagcagaaaacg

SEQ ID NO: 239153 - RNA, 79 nt, Homo sapiens
caaaagaccgaagaccgccagagcccacaaagcaaaaccccggacaagaaagccagagaaacgacaccagggccgccgc

SEQ ID NO: 239154 - RNA, 69 nt, Homo sapiens
gcgacaagaaggaccagagaaaaggcacagaacaagaaccaccagcaaacacaaagggagagagcagaa

SEQ ID NO: 239155 - RNA, 76 nt, Homo sapiens
cacgccccaccagcagcgccagaggcaccggccgaggcaaacccccgcccgaccggaccgcacgcggcgagcagcg

SEQ ID NO: 239156 - RNA, 46 nt, Homo sapiens
cccagcggagcacgaggggacagaagacaccgggaagggcacgaca

SEQ ID NO: 239157 - RNA, 97 nt, Homo sapiens
agcggccggggcccgggcggcgggcggagacggggcgcccccccgccaaggcccggcgaggcggaaaccccaggcacccgcggccccagaaacagac

SEQ ID NO: 239158 - RNA, 83 nt, Homo sapiens
ggacccgaaaccccgaccgcagccaggccgacccgaccggaccagacaagcccgggcgcgccaggcacagccaagagcggacc

SEQ ID NO: 239159 - RNA, 73 nt, Homo sapiens
cgggaccaacaagagcagccccagcgcccacaccgccagccacacaaagagccacccccgcacgggaaaccag

SEQ ID NO: 239160 - RNA, 106 nt, Homo sapiens
ccgagagggagccccggaggggggcggcgcccacgggggagcgagccggagacaggacaaaaccgaccacaggcccgcaggagagagaagagaaggcaggaacgaa

SEQ ID NO: 239161 - RNA, 74 nt, Homo sapiens
gaaagaggcggcccaggagcggcggcgaagaaggaggcaggcacgggagccgaagaaaccgcaaaacgagaacg

SEQ ID NO: 239162 - RNA, 73 nt, Homo sapiens
gcgccacacccacacacaagggaaggacgaacaagaaccaaagaagacagaaacccaagcaggcagaaggggc

SEQ ID NO: 239163 - RNA, 86 nt, Homo sapiens
cggaggcgcggggaggacggagaccagccagccagagggggaccaaaagaacccagccaacccgcagagggaggggaggggcgagc

SEQ ID NO: 239164 - RNA, 75 nt, Homo sapiens
caaccaggaaggagacgccaggaggccagggcagcaccgggcagcgagacgaaaaacagccacccggcaggcaga

SEQ ID NO: 239165 - RNA, 79 nt, Homo sapiens
gaaaaagcgcccgagacgggcccgccgaaaggaggggcagcagcaggacagggaacccgggagacagcaacagacggag

SEQ ID NO: 239166 - RNA, 77 nt, Homo sapiens
cgaagcggaggacgagcgaagcaagaaggacccacgcagaagggggagggccgcaaaaggaaagacaagcagcagag

SEQ ID NO: 239167 - RNA, 84 nt, Homo sapiens
acaccgcggaagcgggaaaggcaccagagccaggacaccgaggggaagaaggaggggagcgaagagagagcccgagaagcagcc

SEQ ID NO: 239168 - RNA, 77 nt, Homo sapiens
aaaagcgcccgacaaagacaaaagaaaagcaagaacgaggagcaccaggagacgcaaccacggggggcaccaaagcg

SEQ ID NO: 239169 - RNA, 64 nt, Homo sapiens
aagccaagaaggacggaaccacaaagaacccaacccccacggcagcaaaaggcaaagaaccggc

SEQ ID NO: 239170 - RNA, 86 nt, Homo sapiens
cgcgcgcggggaccgccggcgaggcaacggcgcaacgggagggcgagacgcaccaccaggacacgaggaggggacggcccgccaca

SEQ ID NO: 239171 - RNA, 81 nt, Homo sapiens
gacacgacaagacgaccgggaaagccagggaggccgcgaaggggcagaacggcccgaaacccgcacccgaaccagaaaaac

SEQ ID NO: 239172 - RNA, 75 nt, Homo sapiens
agaggcggagcccgcagaccgcagaaggccggagacaccagcagggggagagagacgcgggaaccgccagcaaac

SEQ ID NO: 239173 - RNA, 73 nt, Homo sapiens
gacacaggacacgcgggacagccaggcgcaacacacagaaccggccaggagacaagaagcaaaaaggaagaac

SEQ ID NO: 239174 - RNA, 88 nt, Homo sapiens
acagacacgcacaggagaagggcccggagagccgccaacgcggaggcagggcgcaaaagcaccaagcccaacccccaggccaaaagac

SEQ ID NO: 239175 - RNA, 74 nt, Homo sapiens
aaggcaacaagcccacccgaaaccacaaggccgagcagcaacgaagaggcacggagccagagagaccccaggag

SEQ ID NO: 239176 - RNA, 73 nt, Homo sapiens
cggacaggggagcacaaaccacgcccccgagagccgccaacacccggccgagggcacacacaacggggccgac

SEQ ID NO: 239177 - RNA, 73 nt, Homo sapiens
agagccggccgagcgaaaggaccccagaggaggccagaagcggccagcccgaagccaacggggggcaaggcgc

SEQ ID NO: 239178 - RNA, 83 nt, Homo sapiens
caggagcaagacaaaacacaggcagaacaggagggaaaacgacggaacgagaagaggaagagccccaggccccaagagagcac

SEQ ID NO: 239179 - RNA, 82 nt, Homo sapiens
cgcgccagacacccagaacccacagcacgccgcccgcgaaggaggccaaagggcggcgaaggcgcgccacggagccacccaa

SEQ ID NO: 239180 - RNA, 82 nt, Homo sapiens
cccacaacccaaccaggcaccccaccgcgaagacaccagcagcgacccccaggaaagcacggcggcgagcagcacacagcgg

SEQ ID NO: 239181 - RNA, 64 nt, Homo sapiens
aaacagaaagcgcgaagaggggaagcaaagcaacccccggaaagagccgcccgagagacaaacc

SEQ ID NO: 239182 - RNA, 82 nt, Homo sapiens
gcggagcccacgacgagcggaaaagccagacacgcaacgaaagagcaagccagacagcagacaccccgaagaaaaagaagag

SEQ ID NO: 239183 - RNA, 49 nt, Homo sapiens
aaccgacggccccggaagacccgccaggcagaagagaagccccgagacg

SEQ ID NO: 239184 - RNA, 74 nt, Homo sapiens
agcccgcagggacgaggccccaagggcggagcaggacccaaagaagccagaaggaaaaagcgggaaaggcggaa

SEQ ID NO: 239185 - RNA, 74 nt, Homo sapiens
gccgcgcacccccggccggaggcaccagcaacacggccagaaaggaggggcagacgcagcaagcacgcaagaca

SEQ ID NO: 239186 - RNA, 79 nt, Homo sapiens
ccagaccaaaaaaaaaaaacaaccgaggggccgacccaagcacaccagaaagagagcacagaagagggaggagcgccaa

SEQ ID NO: 239187 - RNA, 76 nt, Homo sapiens
agacgagaccaccggcaacacgagagccaacggaccacaacagagaaccaaggacgggaagcagaaaaaagaacaa

SEQ ID NO: 239188 - RNA, 127 nt, Homo sapiens
cccccccgacgccacgaagaacagcagcaagaccccccgggaaccacccgcgcccccaggagggcccccggacccgggagcggacccggggcgggaagcccgaggcggcaacggcggccgggggacg

SEQ ID NO: 239189 - RNA, 73 nt, Homo sapiens
agcccggcgcccgcggccagccgcaagacccgccacaagcaacgcgggaagagaaggcgaccggcccgaggac

SEQ ID NO: 239190 - RNA, 76 nt, Homo sapiens
acaccgaaacagaagagcagacacaggcagcaagaagggaaaacaaagcaagacaccagaagccaacccagagaac

SEQ ID NO: 239191 - RNA, 70 nt, Homo sapiens
aaacggcccaaaaacgacaccacgaaggacaagaccaaaacccacggagccggggggggccccaagcgag

SEQ ID NO: 239192 - RNA, 77 nt, Homo sapiens
gaccggaaagaaaacgagagacgaggcggcaacacgggcggcaagagagggccccgggcccaggcgaccgaacccag

SEQ ID NO: 239193 - RNA, 61 nt, Homo sapiens
cgaccaaggaccaagagccccgcgacaagagaagcaccagaagacgcagggcgcccgacgc

SEQ ID NO: 239194 - RNA, 61 nt, Homo sapiens
ggcggagcgccggccggcggggagcgccaaggccgcagaggcccacagccaggccaagcga

SEQ ID NO: 239195 - RNA, 77 nt, Homo sapiens
gaggagggccagaccagcagacaaagccccccaaacaccacaagggcaaggggaaggccaaggacgagaaagacccc

SEQ ID NO: 239196 - RNA, 73 nt, Homo sapiens
agaaaccagacaaaccgagccagacaacaggacggcggggaacaagggaaacccagcgcacgacacccgggag

SEQ ID NO: 239197 - RNA, 79 nt, Homo sapiens
gggccgccccgggagcccgcgaggagccccacagccgacaacccagggcgcccaggaggacggcagcagggccgcgagg

SEQ ID NO: 239198 - RNA, 61 nt, Homo sapiens
ccgggggcggcggccacgccaaggacggcccgcagacacaaaacgcacacgacagcccacc

SEQ ID NO: 239199 - RNA, 47 nt, Homo sapiens
gcagggcaaaccagaaagacggaccagagaagacacacaacaacccc

SEQ ID NO: 239200 - RNA, 77 nt, Homo sapiens
gcgcggcgcgggacgcgcgcgggcacccacggagccccggggcgagcacacgaagcgaaccgcccccgaaccagacc

SEQ ID NO: 239201 - RNA, 72 nt, Homo sapiens
acaccccacacaagcacgccaagccggcaccgggccggaccaacgcccaaccaagagccaagggcacaaacg

SEQ ID NO: 239202 - RNA, 76 nt, Homo sapiens
aagcgcagggagaaggaagaggggaaaaggaaaggaagccgaagacagaagaggagaacaccacgaccgggaaaca

SEQ ID NO: 239203 - RNA, 68 nt, Homo sapiens
cagggcagcaccacgagccagaagcagagccgacaggaagggaaggggcggagacgggcggaacgcag

SEQ ID NO: 239204 - RNA, 83 nt, Homo sapiens
cgaacggcaggcgccggcgggccggccgccagcaagaggcaaaagcagaccggaaaacccaccggcaagaccacacccgaggg

SEQ ID NO: 239205 - RNA, 84 nt, Homo sapiens
gagaccgccgaaggcgggaagggaagcggccaaggcacggaggccgcgagccgaggaaacccagacccaagaccaaccgaggag

SEQ ID NO: 239206 - RNA, 117 nt, Homo sapiens
gacacacggaaaacgcacagagaaccacaggaccgacccaacgaacagccccaggagaggcaacagaccccccaccacgcggcgcgcggaggaggaggagggggggcagcaacaaga

SEQ ID NO: 239207 - RNA, 74 nt, Homo sapiens
cagaaagagagagcagagaccggacaacagggcagacacaaggaacagccagccaggagaaaaacgaacccaac

SEQ ID NO: 239208 - RNA, 106 nt, Homo sapiens
gggaccacggaagagcacaccaaaacgcaaagaaacgaaggacacgcagaaaaggcaaaagcagaccggaaaacccaccggcaagaccacacccgaggggagccca

SEQ ID NO: 239209 - RNA, 75 nt, Homo sapiens
ggaaagcaccacgagggagcgagggcccgggggcaacaggccgaaggcgacgaagcagaaagggaacaagaagac

SEQ ID NO: 239210 - RNA, 76 nt, Homo sapiens
ccgggagacccagagacagaacggaccggggccgcggaaccaacgggaaaaacaggaggcggccagggcgagccag

SEQ ID NO: 239211 - RNA, 83 nt, Homo sapiens
ggaaaacccagagcgacgaaagaccggaccgagccgcagaagagcggagaggcagaagccccagccgcacccgaggcccggaa

SEQ ID NO: 239212 - RNA, 70 nt, Homo sapiens
acaaaacacacagaaggccggaagagaaggggaaaagacgcacgcaagagcacagaggcccgaaagcaga

SEQ ID NO: 239213 - RNA, 72 nt, Homo sapiens
cgccgcccggggcagaccaggcaggcacacagagaaaaaaagggaacaaaacacagcaagcagacaaaaggg

SEQ ID NO: 239214 - RNA, 93 nt, Homo sapiens
aagcggaaccaaccgggaaagcccggggcaggccaaaccaaacaggaagcacccaccagccaagagcaacagaacagcaagaggaaggggcca

SEQ ID NO: 239215 - RNA, 65 nt, Homo sapiens
caggccagcccaaggcagcagccacgacacccaagccgcacaggagcagcagcgcggaagccaaa

SEQ ID NO: 239216 - RNA, 80 nt, Homo sapiens
cccggcggcggcgggagcccaggagccgccccgcccggggacgaagagcgcagcccccggcgggagccgagaaagcgccg

SEQ ID NO: 239217 - RNA, 73 nt, Homo sapiens
aaagggccaaagaagggagagaggagccggaaagccagggaaaagcagagacagaagcacaaccagaacagca

SEQ ID NO: 239218 - RNA, 68 nt, Homo sapiens
gcagcagggagaagccagaagacggccaggaccacgaagagaaaccaccacgcccaaccggagcccaa

SEQ ID NO: 239219 - RNA, 81 nt, Homo sapiens
acgaggcggacaggcggaggcgacaacagagcaacgggcaggggggaaaagcgcgggcacccagccagggcgccgggccac

SEQ ID NO: 239220 - RNA, 79 nt, Homo sapiens
aggccgcgaaaaccacaacgcaccagagggcaagagcccagcgagacaccggagaccgaagccaccccaaaggaggaac

SEQ ID NO: 239221 - RNA, 59 nt, Homo sapiens
agcaccacggggagacaagcaacacaaagggcgacggaggggcaaaggacaaggagccg

SEQ ID NO: 239222 - RNA, 78 nt, Homo sapiens
ccagaggcgaagcaaacacaacggggagccgccaccaaaagcagacggaaaacccacggggaagaccacaccccgagg

SEQ ID NO: 239223 - RNA, 72 nt, Homo sapiens
aacccggcagaacaagagcaccccagaagacagagagccgcgccaaggaggcgaggcaagcagacccacacg

SEQ ID NO: 239224 - RNA, 81 nt, Homo sapiens
aaggagcggaggagcagcgcagcgcccgaggaagccggggccgagaccccggggaggccgggcggaggacaccgaggcgaa

SEQ ID NO: 239225 - RNA, 65 nt, Homo sapiens
cgaaacaaccggggacgacagcagcccacccgcagcgggaacagacggcaccaggacaagcgagg

SEQ ID NO: 239226 - RNA, 66 nt, Homo sapiens
ccccagggacagcaacagcggccgggaacgaccgaaacaccaggaggggacacaaggaaaagaagc

SEQ ID NO: 239227 - RNA, 80 nt, Homo sapiens
ggacagccaagcagaagccgaggagccggagaggggcggcgccgcgcggccgaggcagaagaagaacccagccggaaaac

SEQ ID NO: 239228 - RNA, 81 nt, Homo sapiens
agaggcaaccccaaggacccgggcgacggaccaagcaccagcaaggccaagacaggggacagccggccgaacggcagcccc

SEQ ID NO: 239229 - RNA, 71 nt, Homo sapiens
aaaagggagacagacgacaaacagaagcgaagcgcgcaggagcagagaggaagcacggccacagggaagcc

SEQ ID NO: 239230 - RNA, 77 nt, Homo sapiens
ggggcaacggagaaaacccggaaccgcgacggcggcaggcgccacaggagccgcagaagcaaaggcaccgccaaacc

SEQ ID NO: 239231 - RNA, 76 nt, Homo sapiens
ggacccgcagccccaaacaggagagaaaccaagagaaaagggggaaaagaaacagcccagagaaccgcccggacca

SEQ ID NO: 239232 - RNA, 58 nt, Homo sapiens
agcagcacccacagccaaggcgggagccacgggcggagaacggaaaagcaccaggaag

SEQ ID NO: 239233 - RNA, 67 nt, Homo sapiens
cggccgccccagagggacagccaacggagcgaagcagagccagggcccggagggaggggagacaacc

SEQ ID NO: 239234 - RNA, 81 nt, Homo sapiens
ggcgggggcgcggcgcggccccggcccggcccccgcaggagcaggaccccaaacagaacgcggcagagaaacggacaagcc

SEQ ID NO: 239235 - RNA, 77 nt, Homo sapiens
aaagaaggggcaaagagcgccgagacgaggagcaccccagggccagcacccagcgacacaacagggagggggcgcca

SEQ ID NO: 239236 - RNA, 76 nt, Homo sapiens
ccggaagccgacccggagccgagcaaccaggaaccgcggcagaggcagccagcgcacccccagcagacccccaccc

SEQ ID NO: 239237 - RNA, 69 nt, Homo sapiens
gggagacaagaaagaaaaccagacccccaagagacaccagagccccggcaggcaacagcagcgcaggag

SEQ ID NO: 239238 - RNA, 60 nt, Homo sapiens
gaggccagccggagaagcgagcagcggagggagcaaaggaggcgcgcccaccgcgagcgg

SEQ ID NO: 239239 - RNA, 52 nt, Homo sapiens
cgccaccgaacagacccggaaggacggcgaggggccagcagaagggaagcac

SEQ ID NO: 239240 - RNA, 75 nt, Homo sapiens
cgccgccggaccccgggaggcgaggacggccgccagaaaagcaggacggaagaagagagggcgaaggaggccaca

SEQ ID NO: 239241 - RNA, 64 nt, Homo sapiens
gaaggaaaggcgcaacaacacaaaaaaagcagcaagggaccgaagaggggcgccggagaggaga

SEQ ID NO: 239242 - RNA, 40 nt, Homo sapiens
gcgaacagcgcggccgcagccgccaccggcaacaaccaga

SEQ ID NO: 239243 - RNA, 74 nt, Homo sapiens
cgcaggcgcaaggccaggcgacccgacgggccaccgggacacagagccacaaaagaggaaacaaacaggaacga

SEQ ID NO: 239244 - RNA, 60 nt, Homo sapiens
cgaggaaagccagcgaaagccgaagcagacgccagacacacagccccagcaaccaccaaa

SEQ ID NO: 239245 - RNA, 72 nt, Homo sapiens
gccccagggacagcaacagcggccgggaacgaccgaaacaccaggcaaagaaaggcagaagagaggcaaaaa

SEQ ID NO: 239246 - RNA, 68 nt, Homo sapiens
ggaacaggcggcaagaacaaaaggagccacagcaaaaagccacgccacaaagccaaaggcagcgaccg

SEQ ID NO: 239247 - RNA, 72 nt, Homo sapiens
ccgacgcagacaggaaaaagacaacaggacgaggggagcaagacaccagcccaggcccacaggggccccccc

SEQ ID NO: 239248 - RNA, 60 nt, Homo sapiens
ggcgcagaccgagacccggacagggcaggaaacaggcccgccaagcgcccccgggcacga

SEQ ID NO: 239249 - RNA, 75 nt, Homo sapiens
gcgagaccaacaccaacacgagggcggcggaaaaagccgccacacgccaaagggggcagaaacgggacgggagcg

SEQ ID NO: 239250 - RNA, 69 nt, Homo sapiens
cggaaacccccgaaggaagaacaagggaaagccagaggcacaagcgagaaaagccgacgcaagagggaa

SEQ ID NO: 239251 - RNA, 66 nt, Homo sapiens
acagggaaaagacaccggcagacggcgaaaggagggcacaggaaaagaccccacaagcaaggacaa

SEQ ID NO: 239252 - RNA, 77 nt, Homo sapiens
gcaaggggccaccaggaggccagggggcgccagcgcaagaagcgaagaggaaagaacaaggaggaacaaaaacagaa

SEQ ID NO: 239253 - RNA, 59 nt, Homo sapiens
gagacccgccaaagccgccgggcaaggaagcagcaaaagaccaaaccagccaaaacaag

SEQ ID NO: 239254 - RNA, 68 nt, Homo sapiens
gcaccagcaggcaaaacgaggcgcagcggggaagggccccaggaggggagggccaccaggaacaccca

SEQ ID NO: 239255 - RNA, 65 nt, Homo sapiens
gcacaccaccggacaaccgacaaaaggacacacaggaagacgaacacggaacgggcgagaagaaa

SEQ ID NO: 239256 - RNA, 81 nt, Homo sapiens
ccacaagacgaccaaaggaggaaggaagaagccaagaggagaaagaagcgacacccacacgaaggcccacagggacaggaa

SEQ ID NO: 239257 - RNA, 82 nt, Homo sapiens
ggacagcagacaagggggcagacacccaccggcgaggaacgcaaggcggggaaaaaaaggcagcacacagacgcagcaacgg

SEQ ID NO: 239258 - RNA, 76 nt, Homo sapiens
ggaagggaccggcccaggccccccgccccgcgcagcagggcaacccgcccagaagaggcaccaggcccaccaaaga

SEQ ID NO: 239259 - RNA, 80 nt, Homo sapiens
agccgggcggccgccccgccggagcagcacacaagaaggggggcggcgcaggacgagagcccccgcaggacccggggcgg

SEQ ID NO: 239260 - RNA, 55 nt, Homo sapiens
ccagccgcgaggcaaaaaccaagaagagagcgggcccagagccgacaagcagacc

SEQ ID NO: 239261 - RNA, 84 nt, Homo sapiens
ggcgccgcgcccaggagggagggacacagccccaaacaggacgaaggcggcgaagcgcaggcacggagaagagccgcgagcgca

SEQ ID NO: 239262 - RNA, 73 nt, Homo sapiens
cccccagagcggaacacaggcaccggacaagagcagagaaagagacgaggaggggaccccaaagcagccgaca

SEQ ID NO: 239263 - RNA, 81 nt, Homo sapiens
ccaaagcagcggcgccggccgccccaccggcggaacccagcaagcccgggcgcgccaggcacagccaagagcggaccggca

SEQ ID NO: 239264 - RNA, 68 nt, Homo sapiens
ccgcgcacagcgcccccgcccgcccccacccgcggcagcggggaaaaccagaaccgaaaacccagacc

SEQ ID NO: 239265 - RNA, 57 nt, Homo sapiens
gggggacaggaaaacgacgcaaagacgaacaaaccgaagcaggccaacagaaaaaca

SEQ ID NO: 239266 - RNA, 90 nt, Homo sapiens
ggagggcaacagcaaaagggcagaggagagacggcggcagggaggcggaaccaacccccggccagggaggggccgggggacgagggcccc

SEQ ID NO: 239267 - RNA, 70 nt, Homo sapiens
ggagaaacaggaaccccagggagcaaagacacagcaacgagggaagaaccaggcaggaggcacaaggggc

SEQ ID NO: 239268 - RNA, 76 nt, Homo sapiens
gagaggagggagaacacagaaacccgccccgggaaagcgggaagagacaaagggagaagccaggaagaggaggacg

SEQ ID NO: 239269 - RNA, 75 nt, Homo sapiens
caagaccggaagcagagagaagcgggcaacaaccagccacggagcccgcacgccaccgcccccaccgccccacag

SEQ ID NO: 239270 - RNA, 79 nt, Homo sapiens
gcgccccgcaggcccggggagggaagcccgcgggcccccagcagcaggccacaggccacgacgcggcaccccgaccgca

SEQ ID NO: 239271 - RNA, 87 nt, Homo sapiens
cgcgcgggaggcccgggagcggcagggaaccgaccccagaacccggacgggcggcggcgaaggggagcaagggagaaaagcaaaggg

SEQ ID NO: 239272 - RNA, 82 nt, Homo sapiens
cgggagacgccagcgagcgggaggagcccgcggagcccccgggcgcgccggacaggccgccgcggcgggacagcggccccaa

SEQ ID NO: 239273 - RNA, 49 nt, Homo sapiens
ccggccaagacgaagggaccacaaggcaaaacggaggaggcagggagag

SEQ ID NO: 239274 - RNA, 71 nt, Homo sapiens
cggagggggccgggaagagggcgacaaggaacagggccaaggaaggagggcggagcaggagaagagaaaaa

SEQ ID NO: 239275 - RNA, 71 nt, Homo sapiens
cagccgccaagaacgcagcagcagccgccaagacggacgggacgaaaaagaagggacaaaaagcagacccg

SEQ ID NO: 239276 - RNA, 61 nt, Homo sapiens
ccgaggccaagaggcgggcgcaggcaccgccgaaaaccaccagcaggacgcggggaccaag

SEQ ID NO: 239277 - RNA, 78 nt, Homo sapiens
ggagcgcgagcggccaggccggcgccggccggcgccccggggcccaaggaagccccagcaagacccggccagagcagg

SEQ ID NO: 239278 - RNA, 65 nt, Homo sapiens
aaaccaccagaagccgggagaacgagggggacgggaaagagcggccgagggacagcgaacagaac

SEQ ID NO: 239279 - RNA, 73 nt, Homo sapiens
cccaaggaaccaaggcggcccggcgggggaaccacagacagaaagcggggcagcaaggcaaggaaaaaacgaa

SEQ ID NO: 239280 - RNA, 74 nt, Homo sapiens
agcgccccaccaggacacggagggccagaacgcaggcagcgccaacaaaaaaaaaccaagaaaccaccagagag

SEQ ID NO: 239281 - RNA, 75 nt, Homo sapiens
cggcggcgaggaaagcaggaggaggggcggcggcgggaagaagacaacccgagccagggcgcagcagggccgccc

SEQ ID NO: 239282 - RNA, 85 nt, Homo sapiens
aagccccccccccgcagacggggagggcccccgaggaccgaaccccggagaagaggaggacggcaaggaaggcaccccaagaccc

SEQ ID NO: 239283 - RNA, 77 nt, Homo sapiens
cagagcgagggagcaagagggcggaggccacgaacacgccggagccgccaggccaaagaggggccagagcaaaaaag

SEQ ID NO: 239284 - RNA, 77 nt, Homo sapiens
ccgcccgcggcccgagggacggccagccgcgcgggcgagaacgcggacaagcaaacaaagaggaaaaagagggcaac

SEQ ID NO: 239285 - RNA, 67 nt, Homo sapiens
acagcccggccaccccccggcccgaagccccacgccagccaaaagcagggacgcggacaaaggggca

SEQ ID NO: 239286 - RNA, 58 nt, Homo sapiens
aggcaagagaagaccgaaccccaccaacaacgaacgcggcaggcgcacaaggaaggaa

SEQ ID NO: 239287 - RNA, 77 nt, Homo sapiens
accccaagaccacaaaggggaaaggcccaggggggccagaaggacaaccggcacgacacgcccacgcaaaaaagccc

SEQ ID NO: 239288 - RNA, 72 nt, Homo sapiens
gacacacccaggaagcagccagaccaagaacaaccgcggacacggagaggaaggaggagcaagagggggggg

SEQ ID NO: 239289 - RNA, 53 nt, Homo sapiens
ccagggcacggagcgcaaagagggcggagaacggaaaagcaccaggaagcaga

SEQ ID NO: 239290 - RNA, 65 nt, Homo sapiens
cgccaaaagcgcaggcaacaccgggcaccgcagggagacaaacgggaccccacaccacaaaccga

SEQ ID NO: 239291 - RNA, 120 nt, Homo sapiens
ggaggcccgggagcgccgagcgcgccgccgccgccgccagaacaaccgggcgccgacgagacggggcgcacccacgacgcgcacaccaccggcagaccggcgccacagcaccacccgacg

SEQ ID NO: 239292 - RNA, 75 nt, Homo sapiens
aaaggcagacggacagacccacaacaccaggcgccaggggaagaaacgagcgagcccgggacagcaagagccaag

SEQ ID NO: 239293 - RNA, 81 nt, Homo sapiens
ggcagcggggaggacaggaaccgcggggccagcgacgacagagacccaggaaaccaaagcaagacaagcgaaggggaacag

SEQ ID NO: 239294 - RNA, 49 nt, Homo sapiens
gggagaaaggaagggacagagggaaacacgggagaggcagcccaagaaa

SEQ ID NO: 239295 - RNA, 47 nt, Homo sapiens
cgcggagaccccagacccccagcgcggcacgaggcgcggaaccccca

SEQ ID NO: 239296 - RNA, 77 nt, Homo sapiens
cccgcgcccacacggggcacgggcccgccacaccgaggccaggcgcacaggaggcggaagcgggcagggcagcgagc

SEQ ID NO: 239297 - RNA, 73 nt, Homo sapiens
ccagaccacaccaaacgcgaggggagcgcagcgggagcagaccaggccaggagacagcagcggacccgggggg

SEQ ID NO: 239298 - RNA, 105 nt, Homo sapiens
cgccccggcggcgacgacgggcgcccccgagccgccgccgcgccggagccccacagggggagaccaccgagcagaaaaaccccagaaaagacggggaaagaaccc

SEQ ID NO: 239299 - RNA, 79 nt, Homo sapiens
gaaagagaagagcaaaagaaaacacacaaaagggaaagcacaacaagccgcagcgcagagaaggagcacacacgggcag

SEQ ID NO: 239300 - RNA, 74 nt, Homo sapiens
ggccagccgagccaaggcaacgaacagaaaaagcggggaaggggggcaaaaaaaagaagcaagcgaagcaccga

SEQ ID NO: 239301 - RNA, 82 nt, Homo sapiens
acagagggccgagaaggacaggacagcgcaggcacgcagggccaacgggacccggcgccggaaaggaaccaggagcgagcag

SEQ ID NO: 239302 - RNA, 56 nt, Homo sapiens
cagaaacagacaggaccacgcaaagagcaaggcaggcgcgggagcgcaaaggcaag

SEQ ID NO: 239303 - RNA, 77 nt, Homo sapiens
caggcagcccggggggagcggccagcaggagcgccggggccggggcgaacgcggccgaaacacgccaaacagagccc

SEQ ID NO: 239304 - RNA, 81 nt, Homo sapiens
gaccaccaaacgggaccagccggcaaaaacacccccgaaaaagccagcggggacaaggaggcaggccgcacaacccggcag

SEQ ID NO: 239305 - RNA, 105 nt, Homo sapiens
caccccagagcagaggacgaagaggaggcaccgcacagacgggagaacaacaacacgaggcaaaccgaaaaggcgagacccaccagcgggaagaagggaagaaga

SEQ ID NO: 239306 - RNA, 60 nt, Homo sapiens
agccaacaacgggcagggcaggcggcggcaagcaacagaagccaggcaaggaacgcggag

SEQ ID NO: 239307 - RNA, 75 nt, Homo sapiens
cagaaaggacaggacggcggaacaaccggacggcacccccggcaaggggagcaccccaggaccaacaacaccacc

SEQ ID NO: 239308 - RNA, 74 nt, Homo sapiens
gaagcagcggcccccaggccacaagccgggggccgcaaggccaggcgcgcagaggcacccaacggcacagaccc

SEQ ID NO: 239309 - RNA, 75 nt, Homo sapiens
gaaaagccacacaggccgagcccgggacccggaagaacgggacaaagggagccaaaggaaaaaagaccccagacc

SEQ ID NO: 239310 - RNA, 80 nt, Homo sapiens
cacaaggaacccaaaagcagagcagaaaagacaagaagcagagacaccacggccaggaggaagaacaccaagaagagggc

SEQ ID NO: 239311 - RNA, 78 nt, Homo sapiens
gagcccgcggaagagagagcagcgagggggaaagaaagagcccggagcagccaggaacagcgagagggggaggagcaa

SEQ ID NO: 239312 - RNA, 64 nt, Homo sapiens
gaacagacaaacgcacaacacacacagcacacaaaaaggagacacagcaccagagaaaaaaaac

SEQ ID NO: 239313 - RNA, 79 nt, Homo sapiens
aaacggaaggccaggagcaagcagcagagacaaagcaggaggacacaagaagggaggaaaggcggacccaggaaccacc

SEQ ID NO: 239314 - RNA, 56 nt, Homo sapiens
agaagaaggcgcagaaagagagagcacagcccagcggcagagccgaggacccgagc

SEQ ID NO: 239315 - RNA, 72 nt, Homo sapiens
aaggccaagaaggcaggacccaggagcgacaccgaacccacgacccacggaccaggaccaggagggcacggg

SEQ ID NO: 239316 - RNA, 82 nt, Homo sapiens
cgccgcccgcgccgccgcagcccgcgccgcgccggccccacagccgcgccgggcgagaacgcggacaagcaaacaaagagga

SEQ ID NO: 239317 - RNA, 73 nt, Homo sapiens
ccgcacggaacagagcggaaaagaccgagcaggccggcccgccgacacagccaccaagaaggcacaagcagaa

SEQ ID NO: 239318 - RNA, 74 nt, Homo sapiens
caaggacacagcacaaaggaagacccaacgaaaggggcgacaccagggccgcagagaaagggcagcaagacacg

SEQ ID NO: 239319 - RNA, 69 nt, Homo sapiens
gcacggccaacagaaggcgagacaaggggaacacagacggcaaacagaagggcgcaggaaaaggcgcac

SEQ ID NO: 239320 - RNA, 76 nt, Homo sapiens
cacgaaagcgggagagggaccggaacggcggcgacaaggggcccgaacagagggaaacagcgcgaacgaagaacag

SEQ ID NO: 239321 - RNA, 83 nt, Homo sapiens
ccagacccacagcccaggagggcagaccggccagaagcacaaagaaagcccccaagaagccacgcagaaaccgagccacccac

SEQ ID NO: 239322 - RNA, 61 nt, Homo sapiens
cacaccccgacggaagagcaaggaaagcagaaggcgggaaaaagagggcacacgggcgagg

SEQ ID NO: 239323 - RNA, 76 nt, Homo sapiens
cagagccaaaaagcggacacaaaaggacggacaggaggacaacgggaccggcagacggcagaaaacagacgaagca

SEQ ID NO: 239324 - RNA, 79 nt, Homo sapiens
ccagagcacgccgaagccaccagaccgaccggcccgcgcaacgccgcgacccgaccgaccggcgcacggagacacgggc

SEQ ID NO: 239325 - RNA, 76 nt, Homo sapiens
ggaaagccgacagagaagagagaccacaacacagaagaaacccacaggcagaaccaggcccaggccagagcccggg

SEQ ID NO: 239326 - RNA, 83 nt, Homo sapiens
cggacgaaaccacggagacccacaaggacagcacagcgcgcggaggccggcggaccagaaagaggagccgcccagacaggaag

SEQ ID NO: 239327 - RNA, 83 nt, Homo sapiens
cggggcggcgccgaggggaggaggcggaacagggccaggccgagggcccgcccggccccaggagaagaaccagccgcagagga

SEQ ID NO: 239328 - RNA, 79 nt, Homo sapiens
gagcgggggagcgaccgaaaccaccgagaacaggagggcaaaccagccggcgggcgccacaacggacgacgaaaacaca

SEQ ID NO: 239329 - RNA, 64 nt, Homo sapiens
gccaagagccaccggaacaaggcagcgggagagaggagagcagagagcagaaacaccgaccacc

SEQ ID NO: 239330 - RNA, 73 nt, Homo sapiens
ccgcaccacaagggacgagaccaaacggaagaggcaaaaaccccccacgaaagaaacggaggccaggaaacga

SEQ ID NO: 239331 - RNA, 74 nt, Homo sapiens
aaaccacaaaccaggaaagcggagcaagggaccacaaaaaggagaaagaccgaacccgaagccaaacagaacag

SEQ ID NO: 239332 - RNA, 81 nt, Homo sapiens
aggaacaggcggcgggcgagccaaagcaaaccccacgagaacaaagcacggcagaaacggaaaaaaaccaagaaagccgga

SEQ ID NO: 239333 - RNA, 88 nt, Homo sapiens
cgaagcggcaccgaggccggggccaacgagccaacgccaggcgccgcccacagcaagcgaacagcgggaagagaagaccagcagcgac

SEQ ID NO: 239334 - RNA, 81 nt, Homo sapiens
gacacaaagcggaccaggaggagaagggggcagaggagacgaacaaacaaggccggaaaaacgacggagaacggaccgaag

SEQ ID NO: 239335 - RNA, 80 nt, Homo sapiens
accaacagcagcggcagccaagcagcgggcccaggccaggagggcaagaacacgcagaagacccgaccaagacacgcccc

SEQ ID NO: 239336 - RNA, 39 nt, Homo sapiens
cacgcgccaccaggacaaaggcacaagcagaggaaccag

SEQ ID NO: 239337 - RNA, 37 nt, Homo sapiens
ggggccagcccagacgggggacagcaacagaccagcg

SEQ ID NO: 239338 - RNA, 78 nt, Homo sapiens
cccagcggcagcagaaagagcaaaacagaccaccccaggaaaagagaaccgccgaaaagacaagaacaaaccgaaccc

SEQ ID NO: 239339 - RNA, 82 nt, Homo sapiens
gagcagaaaacaaggaggaggcgagcacaagcagcaggagacccagaaacagagcagccacaagaaggaccaaagcacgaaa

SEQ ID NO: 239340 - RNA, 86 nt, Homo sapiens
caaaggagcgccaagccaaaacggaccacgaggagggagaaggccacagggggccgacgacgagccccgcgaggagcgcagcggag

SEQ ID NO: 239341 - RNA, 81 nt, Homo sapiens
aacaagcaacgcccagcacgacggcaaagagagaagaagaaggaggccgcggccagaaacccaagaaaaagcgaaggaacg

SEQ ID NO: 239342 - RNA, 75 nt, Homo sapiens
acaaggccaccagaaggaggagaggcgccaggaggagcagccaacaaagaggaacaagcagaaagcacgaacaac

SEQ ID NO: 239343 - RNA, 82 nt, Homo sapiens
caggcccgccacccccagccaggagcacagcaagcgggagcaggcagaccaaaggaacagaagccagggccggaaaaccaga

SEQ ID NO: 239344 - RNA, 83 nt, Homo sapiens
cgcgacacagccaggaggaacccggccacaccagagcggggcggagaacaggcaagaacgcgcaacacagcgaccgacgggac

SEQ ID NO: 239345 - RNA, 75 nt, Homo sapiens
ggagcagaccgaaaacggggacagaacaaggcgacccacccagccaacaaacacccgaaggaccacacgaggaca

SEQ ID NO: 239346 - RNA, 54 nt, Homo sapiens
cccaaagcacgggggcaacagaggcgcagggagcaggagaagcggagcgaaggg

SEQ ID NO: 239347 - RNA, 74 nt, Homo sapiens
gaggggaccaagccggagccgccccaacagcgcagacccaacccggagccggggacggcacacgggcgggggca

SEQ ID NO: 239348 - RNA, 80 nt, Homo sapiens
ccccccgggccgggggcgaaggacacccgcaggaaccggcagaggagaaacagacggccccgagggccggggcagcagaa

SEQ ID NO: 239349 - RNA, 74 nt, Homo sapiens
ccggcgcccgcaaccgcgacgaagaaaaaaagagcgacgaggcaagaccggaaaaggagaaagaaacaacgagc

SEQ ID NO: 239350 - RNA, 72 nt, Homo sapiens
ccacaggcgcaagcagggagaaagcgaagaggaccggaaaaaccccccgcccggcgcaccgaaacgacgaga

SEQ ID NO: 239351 - RNA, 77 nt, Homo sapiens
gggccggggcgggcgcccccgcagcaggaggacgagcaccaggacacgggcggagccaggcaaaccccccagagccc

SEQ ID NO: 239352 - RNA, 67 nt, Homo sapiens
aaagacaagccgggagcagacaagagacgccaggaagccggacgcgcagggaaaacgagaggaccca

SEQ ID NO: 239353 - RNA, 60 nt, Homo sapiens
cacaaccagggaccggcacgaaaccaacaccgcccaaggaccgagaggagccgccgcacc

SEQ ID NO: 239354 - RNA, 59 nt, Homo sapiens
acagccgagcgagagcaggaagacggcaggagcgagaacccgagcagcgccagagcaac

SEQ ID NO: 239355 - RNA, 70 nt, Homo sapiens
ccgggagggcgcagcggggacgcggacgcacggagacagccaaaccaggaggcacaaaccgaagcagcaa

SEQ ID NO: 239356 - RNA, 85 nt, Homo sapiens
gcgggagcccggccggagcgggcggagacgccgggcagccgaacggagggcgacggagggagccgggagaacaagacaagcacgc

SEQ ID NO: 239357 - RNA, 39 nt, Homo sapiens
aagaggcggagcgggcgaaaaagccgacacagcccccga

SEQ ID NO: 239358 - RNA, 78 nt, Homo sapiens
aaggggccccgcgagacggaccgggggagacccacacccaccgcccgggcaggccacggcggagagggccgggcgcgc

SEQ ID NO: 239359 - RNA, 75 nt, Homo sapiens
acaaacaggaaaacaaagaggccaagaagacagagcgggaccacgaagccagggagcaggcagaaaagaaaagac

SEQ ID NO: 239360 - RNA, 81 nt, Homo sapiens
ccgcccgcggcggccaggaacccgaccgcccccgcccaggacacccccggcaccgaggaaaacaagcccaaggaggaaagc

SEQ ID NO: 239361 - RNA, 59 nt, Homo sapiens
caaaagacagcccagacaggaacccaaggaccgcaaagaaaacccagagaacaccaccc

SEQ ID NO: 239362 - RNA, 76 nt, Homo sapiens
acacgccaaaccgcaaacaagaacaaggccagaggcaagaaggagaacgaagagaaaggacacccacccagaacca

SEQ ID NO: 239363 - RNA, 77 nt, Homo sapiens
gacccgcgcgggaggaccaggcagccaggcagcgcagaggcccagggagaggccacacgcccagccggagaaagcgg

SEQ ID NO: 239364 - RNA, 71 nt, Homo sapiens
cagccccagcgccgacgaggcaagggaacaggccaggggccgcacagacacagccgccacaagggccgccc

SEQ ID NO: 239365 - RNA, 75 nt, Homo sapiens
caaaaccaggcggcaaccccggggcgacaaaaagggaacgggcacaaagcaggcgggaggccgaaggcaccaacc

SEQ ID NO: 239366 - RNA, 67 nt, Homo sapiens
cccgacgcggagggccggcaacggccacagcaccggggaggcaaaaagggagcgggaccacgcgggc

SEQ ID NO: 239367 - RNA, 78 nt, Homo sapiens
gaggaggcgcgcgcgcgccgagccgcgggcccgcagagaagagcgccgcgcacagaaaggaacaggcacccgaggaca

SEQ ID NO: 239368 - RNA, 76 nt, Homo sapiens
gcacgccaacaagggccgccgcgcgagcgacgcgcccacggaggaggcgggggccccacaagaagaccaacaggaa

SEQ ID NO: 239369 - RNA, 90 nt, Homo sapiens
gaagccccagcagacagggccccacagcaacagaggcgcagcccaaggaggaggaggccagcagccagagagagacacgggggaaaccca

SEQ ID NO: 239370 - RNA, 84 nt, Homo sapiens
gaagagggggcgaggagagccggagcggggacccaggagccggccagcgcgccggagccgccgagaaggaggggaaagccagcg

SEQ ID NO: 239371 - RNA, 79 nt, Homo sapiens
aacacgacccagcagccagagagccaacaagggaggcgaggacggacaaaaggaaacggacgggaggccagccagcaga

SEQ ID NO: 239372 - RNA, 95 nt, Homo sapiens
aacccaaaagaccacacacagccgacacaacaagacagacgccagggcaaaccagccagcacgggggcccagccagccagcagcgaggggggacg

SEQ ID NO: 239373 - RNA, 92 nt, Homo sapiens
gagacacagcaaagcaaccaccaggcagagacagccaacaaaaacaggcgagaacagccacaggaagagggaacaaagaaggaaacaggaga

SEQ ID NO: 239374 - RNA, 78 nt, Homo sapiens
cggcacccagcaggccaacccgggcccaacagcaacaggccaaaggggcgcacacgcaggaagacagcgaagaaagga

SEQ ID NO: 239375 - RNA, 84 nt, Homo sapiens
gccggggagggggcggcggcagcgggcggacggccggcgggggcggcggcggccagcgccaggcgccagggacgaaaccacgca

SEQ ID NO: 239376 - RNA, 59 nt, Homo sapiens
gaaggcaacgcaagggaacggagacaagaaaacgcagggcgaggaaccaaagccccggc

SEQ ID NO: 239377 - RNA, 75 nt, Homo sapiens
caccaccccaaaggagcggagagagagaagggcggagaacggaaaagcaccaggaagcagagaggaccgcagaag

SEQ ID NO: 239378 - RNA, 78 nt, Homo sapiens
cggcggaaaaccgaagggaaggccagcagcgcgcggagaagaacggggagccaggacgacgggggacagaagaggaaa

SEQ ID NO: 239379 - RNA, 73 nt, Homo sapiens
ggcggcagcggaacccgggcccaaggaccccaacagcccacaaagcacggaaacagaggagggccggcccagg

SEQ ID NO: 239380 - RNA, 50 nt, Homo sapiens
aggaaaccgccccaggaccagggaggagcacaagcagcaggccaaaggca

SEQ ID NO: 239381 - RNA, 78 nt, Homo sapiens
cgaggcgccgcggcacgcgaggccccgccagagggagacgcgcacggaccggaaccagaacaagacgaaagacaacga

SEQ ID NO: 239382 - RNA, 60 nt, Homo sapiens
gggccaggaagcagagagaacagcccgggcaccgaccaagacgacgcccaggcggacaca

SEQ ID NO: 239383 - RNA, 68 nt, Homo sapiens
cggccaggcacaagggcaccacaaaggcagaaaggagaaacaaaagagacccaagcccagacagaaac

SEQ ID NO: 239384 - RNA, 63 nt, Homo sapiens
cgacgcggggccaggcaggacccaacgacaggcgccccggcccaacgcggacaggcaagacag

SEQ ID NO: 239385 - RNA, 77 nt, Homo sapiens
gccaaccccacggaacaccacacacccagcacggcccaaagaagagcaggccaaggaacaagaagagaaacgaagcc

SEQ ID NO: 239386 - RNA, 83 nt, Homo sapiens
cgacacgcgcggacaaggacgacaacgcaccagggagggcaggggaccgcgcaaaaaccggccgggacaaagaccgaggggca

SEQ ID NO: 239387 - RNA, 80 nt, Homo sapiens
ccaacacaaaccacaaaaacaacaaggccaccaaacgagagcagccaacggagacccagagaagcaaggaccaggcacag

SEQ ID NO: 239388 - RNA, 75 nt, Homo sapiens
cagccccgggggccacgagcggggggacgagcccagaagccagacaccgacgcaaggagcggaaaagcaagacgg

SEQ ID NO: 239389 - RNA, 75 nt, Homo sapiens
caagccccgcccggccaacaaacacaagacacccaagaagcccagcagacccaacgcccagcaccaaaagggcca

SEQ ID NO: 239390 - RNA, 65 nt, Homo sapiens
aagaacaggaagccccacagacaagaaagaagccaacaggacaaaccggcgaccacacacgggga

SEQ ID NO: 239391 - RNA, 72 nt, Homo sapiens
gccagagaggggccccccaccacgaagagcaggggaaggcagccaacagggaagccagcagaaagggaccgg

SEQ ID NO: 239392 - RNA, 79 nt, Homo sapiens
cccccaggaggcgaggagagggggcgcaggcaaggcagcagcaggaaaaccgccgagaagcagccccaaagaaggccac

SEQ ID NO: 239393 - RNA, 73 nt, Homo sapiens
gcaaagagcgaggacagcagaaagaccacagagacccagagagaaacagggcacagagcagaggacaccacag

SEQ ID NO: 239394 - RNA, 90 nt, Homo sapiens
ccggccgccggcaggacaccggcacggcaacccgcccgcaggccgggccagagccaggaagccccgacaagggaccgggcgggccccgca

SEQ ID NO: 239395 - RNA, 75 nt, Homo sapiens
gaaaaagaacgacagagcaaccaggaaagaagaggcgaaccaagccaacggaaaggcaccgagcagaaaagaaca

SEQ ID NO: 239396 - RNA, 73 nt, Homo sapiens
caaagaaaaaacgcgccagagaaacacaaaaagacgcacaacagccagcaggaagagaccccggagcccaccg

SEQ ID NO: 239397 - RNA, 72 nt, Homo sapiens
cccggcaacgcggcaagccaaagcgccacagaacaagacgggaaccgaccaccaagggcaggaagagccacg

SEQ ID NO: 239398 - RNA, 54 nt, Homo sapiens
aaagggagaaaaagccagcagagaaccaagcgacagccccaaagcgggaagccg

SEQ ID NO: 239399 - RNA, 58 nt, Homo sapiens
ggccccaacaagaagagacaggggaaacaagagcacaggaaaaagaaccgacagagcg

SEQ ID NO: 239400 - RNA, 59 nt, Homo sapiens
ccaccaagggcgcaagggggacgaggccagcgcgaacacccgcaaacaccacccaagca

SEQ ID NO: 239401 - RNA, 73 nt, Homo sapiens
aggaacgaacgggacagagggggacagcgaaacacggccaggaaagccgccgggcggcaaccggcgggaaccc

SEQ ID NO: 239402 - RNA, 78 nt, Homo sapiens
cgaagcacgacacagaaggggaggggagggaaaggcccaggaaaaaggaagaaggaaagaccacggagaagacagaac

SEQ ID NO: 239403 - RNA, 75 nt, Homo sapiens
gcagaaggagaaggaagcgcacaaacacacccgagcaggcacacgagcggccacgagcaaccaagaggagaagga

SEQ ID NO: 239404 - RNA, 81 nt, Homo sapiens
ccggaagcacacccaccgccgaagaaaacacaaggagagggagcggagcgcagaaggaacagcggcggcaggaggagaacg

SEQ ID NO: 239405 - RNA, 67 nt, Homo sapiens
ggccaacacgaagccggcacacaagacaacgaaaaggagagaaccaggagaccgaagcaaccaacaa

SEQ ID NO: 239406 - RNA, 78 nt, Homo sapiens
gagccgcgcagccccggagcacgcaacggggcggcacacaaggagcgaagggcagggagaacgccaggcacagcacga

SEQ ID NO: 239407 - RNA, 79 nt, Homo sapiens
ggcgacccgggcgaccacggggcgcggcgcaaaggccgcaggcgcgcgacccaaggccagccagccccaggcaccagcg

SEQ ID NO: 239408 - RNA, 66 nt, Homo sapiens
accagagaggggcaccccggggacaagccgcaccacgccaaggaaagacgccaggaagccggacgc

SEQ ID NO: 239409 - RNA, 51 nt, Homo sapiens
cgccggccgagaaggcagaggcgcagaaaaccacacaaagggcaaaggaag

SEQ ID NO: 239410 - RNA, 77 nt, Homo sapiens
agcggaacacacagcaagccgccgggacagccacgacgaccgaggccaaaagaaaggaagaaaacccccaaaaagcc

SEQ ID NO: 239411 - RNA, 86 nt, Homo sapiens
gaaagggggaccgaccaggacgacacgaaggaggaagaagagacgaagagacagcggagaagcagcggaggaggagaaagagagga

SEQ ID NO: 239412 - RNA, 72 nt, Homo sapiens
caagacgcaagcggcagccggacagagagaggcagaagaaaaagcacccccaagcgagagagcggcccaaaa

SEQ ID NO: 239413 - RNA, 97 nt, Homo sapiens
ggccaggaagccgcgaggcggaaagcgagagggagagcaggaccggaacaaacaagaccaaaagaaggggagcccagaagcgagaggaaaaggcaaa

SEQ ID NO: 239414 - RNA, 85 nt, Homo sapiens
gcgaaccccgggacacgcaggaacggcccagcacaagaccgcgacagggagacggcgaaaaccaaagaagaaaagcaccccaaga

SEQ ID NO: 239415 - RNA, 41 nt, Homo sapiens
gcccggagccgccccagccacagggacgaacagcggggacg

SEQ ID NO: 239416 - RNA, 55 nt, Homo sapiens
gggagccaaggaccaggaaaaaacacaggggagagagcccaccaaggaaccacga

SEQ ID NO: 239417 - RNA, 60 nt, Homo sapiens
ccagggcgacagcaggagcgagccaagcccggcggggcgggcgaggaaggaggacggcca

SEQ ID NO: 239418 - RNA, 53 nt, Homo sapiens
gaaggcagcgcccagcagcgcagaagaccggagacccgaaagaggaagagcgc

SEQ ID NO: 239419 - RNA, 81 nt, Homo sapiens
cgggccccggcggggccccgccaggccgccggagaggaaacgaaagaccgaagggagaaaggagaagaagaaaggagaaga

SEQ ID NO: 239420 - RNA, 69 nt, Homo sapiens
cccccgggcccagaaccaggcccgaaaagcaccccccaaagccggagcggacgagagcgagccgggagg

SEQ ID NO: 239421 - RNA, 55 nt, Homo sapiens
gcgggggaccagcgcgaaagagaaacaaagaggacacgggccccggagcccccca

SEQ ID NO: 239422 - RNA, 74 nt, Homo sapiens
gggaacacaagaaaccaaacaagccgaaagagcaagggagcagcacaggaaggagaaaaagcacaaaaaaacgc

SEQ ID NO: 239423 - RNA, 64 nt, Homo sapiens
ccagcagcagaccggaagagagcgggaggaagaaggaggaccaccggaccccgccgagcgagga

SEQ ID NO: 239424 - RNA, 77 nt, Homo sapiens
gggagagcagaagccgcgaaaaaggggggccgagcaaaagagccaacacccaggccaggccgcccggaaggaggccg

SEQ ID NO: 239425 - RNA, 82 nt, Homo sapiens
aggcacaggaaaccagaaggcgaagaagagaggggaaggggcaaaaaaacaaaaaaagaagaccgaccacaaaaggacaagc

SEQ ID NO: 239426 - RNA, 82 nt, Homo sapiens
gccccgccgccgccgaggaggcgagcagccgggagacaccgccaccgccaggcgggggagcgggaggagccagagcacaccg

SEQ ID NO: 239427 - RNA, 73 nt, Homo sapiens
ggccaagcacggcaaagggcagcaaccaaaagccagagaggggccaccgcaccaggcggaaaagggcacaaca

SEQ ID NO: 239428 - RNA, 82 nt, Homo sapiens
gggaaggcagccagcgccgacagaaggggacagcaccgcgaaagccccaggggccaggacccacagacacccagaccaggcc

SEQ ID NO: 239429 - RNA, 72 nt, Homo sapiens
cgacgccgcgcgggccgcgcgcgcgcgcccggaaaccggacgcagagaacgagaagggacccaaggaagccg

SEQ ID NO: 239430 - RNA, 70 nt, Homo sapiens
ggaacaacacgggcaccacaggccggaaaaacagggagagccacagagggggaaagccaaggaaaaacgg

SEQ ID NO: 239431 - RNA, 47 nt, Homo sapiens
gggacagagcacgggcggagaccacggaaggaaccccgacagcagag

SEQ ID NO: 239432 - RNA, 68 nt, Homo sapiens
gccgacagacaaccaggaggaagcggagggcaccacggggaggaaccaagcggggaggagaacaagaa

SEQ ID NO: 239433 - RNA, 73 nt, Homo sapiens
acggcggccagggccgcggggaccgaaaggacagaacaggaccggaaagagagccaacggaccacaacagaga

SEQ ID NO: 239434 - RNA, 90 nt, Homo sapiens
cagccgccgagggcacacacgggccagggagcggcaagaaggcccaagaagagaaaggagcggacaacaaagaagggcccggaacccagg

SEQ ID NO: 239435 - RNA, 60 nt, Homo sapiens
ggccagcagggcagggggaacgcccgcccagccaccagagaaaagagaaagaaaagaaga

SEQ ID NO: 239436 - RNA, 54 nt, Homo sapiens
gccaaaccgacccgggaggccccaggcacaaacgggcagggaacacacacaaaa

SEQ ID NO: 239437 - RNA, 69 nt, Homo sapiens
gacaccgccccaacccacgagaggacagcccagggaaacccagacgacaaggaaggccaagggacccac

SEQ ID NO: 239438 - RNA, 78 nt, Homo sapiens
ccacaacccagaccacagggaccagcggcaggagacagggaaacgaaaaccaccgggcaccacgagcccacgagagag

SEQ ID NO: 239439 - RNA, 66 nt, Homo sapiens
ggaggaaaccaagacagcccaaacgccccacgaccagcccagcaaaaccggcggacaagaacacgg

SEQ ID NO: 239440 - RNA, 80 nt, Homo sapiens
cgagccccccaccgcagcgccaacgaggggagacagaacagcagcccggagacacgagaggcgagggacgacagagcaag

SEQ ID NO: 239441 - RNA, 79 nt, Homo sapiens
ggacaagcccaggagccgaccagagagcagggagacgagagagaaaggagacaacgagaagagagaagcgaaaacgaaa

SEQ ID NO: 239442 - RNA, 68 nt, Homo sapiens
cgaacaccgacggagccagagggccacagaagaagagacgcagaacgggagggccacagcaagagagc

SEQ ID NO: 239443 - RNA, 57 nt, Homo sapiens
cgccgggcgcgcgcccgcggagcccgaacacggcgcaccgcgacccccgcacccacg

SEQ ID NO: 239444 - RNA, 60 nt, Homo sapiens
agagggaaaacaaagaaccaagcacacggccgaaaaaagccgagagaagaacagggagga

SEQ ID NO: 239445 - RNA, 77 nt, Homo sapiens
acaaaaaagcggaaaaacgaggggggaccacacgccaaaggcacggggcaagccacaggggagaaagaagagagaac

SEQ ID NO: 239446 - RNA, 38 nt, Homo sapiens
acacgcacgagacaggccaagggagacaagccagccaa

SEQ ID NO: 239447 - RNA, 81 nt, Homo sapiens
cagaggcagaagcccccaagaaagcggggcagccccgcaggcacagggaagaaaaggacccccagagagcaaaaacaaaca

SEQ ID NO: 239448 - RNA, 85 nt, Homo sapiens
agggggaagcggcccagggaggggaacccgagcgcagaggggaagcagaggacccaggcgaacagcaaggaggggacaaaacagg

SEQ ID NO: 239449 - RNA, 73 nt, Homo sapiens
gaggggcacacgcccgcacgagcagcggagaagggaaaggccccccgggcaagccagcaccgagaaaccccag

SEQ ID NO: 239450 - RNA, 88 nt, Homo sapiens
gcacaggcacgggaagcacggaggcagcggcggaggaagaaaaagagcaggaagcaacagggggccaaagggcgagggcacaaaaaac

SEQ ID NO: 239451 - RNA, 72 nt, Homo sapiens
gcgcagagcaggacgaaacgcacccgaggagggcgaaccgaccaagaacaacacccagagggccaggagaag

SEQ ID NO: 239452 - RNA, 39 nt, Homo sapiens
agaaagagggaagcacagaaaaggcaaggaaggagcacc

SEQ ID NO: 239453 - RNA, 64 nt, Homo sapiens
ccgcgaccaagccagcaacagagacgcaggcagaaggaaagggcgcagaccgggcagcagcagc

SEQ ID NO: 239454 - RNA, 41 nt, Homo sapiens
ggaacggaacagaagcaaggcaccgcacaggacagccacca

SEQ ID NO: 239455 - RNA, 71 nt, Homo sapiens
cagcagcagccgccaagacggggcacagagcccaaaaaagagccacgaagcaccggcgggaggacgaaagc

SEQ ID NO: 239456 - RNA, 75 nt, Homo sapiens
aagcaggggaagccgcaaccagccacaccaagagaccacaaaagcgaaggagccaagagaccaaccaaggaaacc

SEQ ID NO: 239457 - RNA, 78 nt, Homo sapiens
aaagcggcaaggcaacaggagggaagacaaggggaagcaacaccagagaacacggaagacgaaaaaaaaccggacaag

SEQ ID NO: 239458 - RNA, 76 nt, Homo sapiens
gcggcgagcccaaaaagcccgcaggggcgagggagcgaaagacaaacggcaaagaagccaacaacaaccccgagaa

SEQ ID NO: 239459 - RNA, 56 nt, Homo sapiens
gaacccaagcaccggagcaagagacgagagccccgccaaccagccaacccccagga

SEQ ID NO: 239460 - RNA, 64 nt, Homo sapiens
acgcaaagagaagaagggggaaaaagggaccgcgggccaaaaggacgagagcacagcccccagg

SEQ ID NO: 239461 - RNA, 72 nt, Homo sapiens
ggagagcaagaccacagcgcgcggcccccacaccacacagagagcgacccaaaaaacagacggacgacgaga

SEQ ID NO: 239462 - RNA, 75 nt, Homo sapiens
ggacgagggcggcgcgggagcagcacccacagccaaggcgggagccacggaacgaagagaacggagaagagcacg

SEQ ID NO: 239463 - RNA, 73 nt, Homo sapiens
gggcagcaagcagcagggacgcgaggaccacgaggagcaacggcgagccgcgaagccacccccgggacaaagc

SEQ ID NO: 239464 - RNA, 72 nt, Homo sapiens
agcagggggggaaaaaagccgaaaaccccccaacaaaggaagggagcggggagcgaaaggaaacgggcgaaa

SEQ ID NO: 239465 - RNA, 74 nt, Homo sapiens
cgcggcccggggcagagacccgccagaaggcagaacgccaaccaggaaccgaacccccagaggacgaaaccgca

SEQ ID NO: 239466 - RNA, 78 nt, Homo sapiens
cacaccaccacccgcagaccccccagcagggccgccgcaacgcgcagccaggagcgggcgccccacgggaaggaagag

SEQ ID NO: 239467 - RNA, 79 nt, Homo sapiens
gggaaaaggccagccgaggaaacccagacccaagaccaaccgaggaggaggaggagggagacgcgcccaggcagaaagc

SEQ ID NO: 239468 - RNA, 80 nt, Homo sapiens
agcagagcgaaggaacccaaacggacgaaggaccacaaggaggcagacagcccgagagacaacagagaagggagagagag

SEQ ID NO: 239469 - RNA, 75 nt, Homo sapiens
cccggcaagaagaacacagggggaagccaagcagaacaaccaagacaggaacacagagagcaacagaccagaacg

SEQ ID NO: 239470 - RNA, 71 nt, Homo sapiens
ggggcagaaacagagaaggaacagggcggaccgggaagaaccaaagcgcaaccaccaaaggaagccgccaa

SEQ ID NO: 239471 - RNA, 85 nt, Homo sapiens
cgccggacccgggggagagcgggcgaggcacgcgggcggagaccaggcccagccccgggagggaacgaagcccgccggccacccc

SEQ ID NO: 239472 - RNA, 79 nt, Homo sapiens
cgacaccaccggcagcgggaagacagggggccccaagaccggcagcgccccgagccaaaccgacgacccggaggggacc

SEQ ID NO: 239473 - RNA, 84 nt, Homo sapiens
ggaagcgggaggacgggccaccgcggcgcgccgaaaaacgcgggaacgaagcacaaaagcgcgaaggaagcagcacgaccagcg

SEQ ID NO: 239474 - RNA, 86 nt, Homo sapiens
gagaggaaggacggagaaggcagggaggcaacgagccggcagcagagccgaccgagcacgccgaggacgagacagagggaggggac

SEQ ID NO: 239475 - RNA, 63 nt, Homo sapiens
ggagcggcgcagaccgagacccggacagggcaggaaacaggacagagcgggagccaccagcgc

SEQ ID NO: 239476 - RNA, 82 nt, Homo sapiens
gagcagcagaaacgcacccaggacaggacccaggcccgaaaaaaaaaggacaaagaacgaaaccaccagacacccaccagag

SEQ ID NO: 239477 - RNA, 53 nt, Homo sapiens
gaagagccgccccacacgcagaaaagggagaggagccgaaagacgagaagaag

SEQ ID NO: 239478 - RNA, 71 nt, Homo sapiens
cagacaccgggaaaacagggaccgagcaagcaggccacaacagagccggggggggcacagagccccggaag

SEQ ID NO: 239479 - RNA, 55 nt, Homo sapiens
aacaaggcaacagaaagagcaacagcagggcaacagcaaccaccgaaacgggcga

SEQ ID NO: 239480 - RNA, 54 nt, Homo sapiens
ggaagggcaggaggaggaggaggggcccggcggcggggagagagagcgccgccg

SEQ ID NO: 239481 - RNA, 80 nt, Homo sapiens
cgcccaagccccaccgcgagacaagcagaccggaagaccgacggaagaccacaccccgagggagcccaggacaccacgag

SEQ ID NO: 239482 - RNA, 83 nt, Homo sapiens
gagcagaacccccgcagagaaagacaagggaggcgaggacggacaaaaggaaacggacgggaggccagccagcagaaggagga

SEQ ID NO: 239483 - RNA, 67 nt, Homo sapiens
cgggagggaagaaacccagggcgagaaagaggaccaacgaaagccagagagacccacggcccagccc

SEQ ID NO: 239484 - RNA, 65 nt, Homo sapiens
aaagaacaaggccaaggaagcgcggagccagagaccaagagcccagagaacagagcgccccaccg

SEQ ID NO: 239485 - RNA, 38 nt, Homo sapiens
cccagcaccaacaacaaggcagaccaccccacgaagac

SEQ ID NO: 239486 - RNA, 78 nt, Homo sapiens
aacggccccagcagagcccgcgaccagagcacgaccgcacaggcaaaggaaggcgaacacaaagagaaggaccggagc

SEQ ID NO: 239487 - RNA, 74 nt, Homo sapiens
gaagacggccaggccggccggccggacaagcccaggagccgaccagagagcagggacaagagaaaaaaagggcg

SEQ ID NO: 239488 - RNA, 44 nt, Homo sapiens
gacgcagggcgcccccggggcgaaggagccagggaggcagccga

SEQ ID NO: 239489 - RNA, 69 nt, Homo sapiens
aacgccgaaacaagccggagaaggggggcgagcccggcccggcccggaaggaaaaccaccagcccaccg

SEQ ID NO: 239490 - RNA, 75 nt, Homo sapiens
accaggaggagaagcgggagcagaaggcaagcaccgggcagcagaaggcaacagagggaaaagacaaacggagca

SEQ ID NO: 239491 - RNA, 74 nt, Homo sapiens
gcaggggaccacgggaccaagcgaaaaccccaacagacacagggcggagagagcagaagcccacacagcgaagc

SEQ ID NO: 239492 - RNA, 85 nt, Homo sapiens
cccgagagcgggagcgggcgggccaggaaagcagagagacacagggaaacgcgcccagacagcacacgggagaggccagcagcag

SEQ ID NO: 239493 - RNA, 71 nt, Homo sapiens
gaggggacaaaaccccgaaaaaggcccagaagacgaaacaggaacacgaagcgcaaacgccgagaaggcca

SEQ ID NO: 239494 - RNA, 74 nt, Homo sapiens
gcccacccccacaaggagggcaaggcccaagcgggacgagccggagggaaggaggagaagcgaaccgcaggaga

SEQ ID NO: 239495 - RNA, 60 nt, Homo sapiens
ggcacacccacccagagcggcggggaaggccacccagggacgaacagcggggacgcccca

SEQ ID NO: 239496 - RNA, 100 nt, Homo sapiens
cgcgcgcggaacagacaagcagagccggcaccacaggaagccgagcagggcaaacagcgcacagcaagggcagaggaaaaggacaccgaagaaagacaac

SEQ ID NO: 239497 - RNA, 66 nt, Homo sapiens
acacgagaccggacaccccagaggacacggccacagggggaggaggaagaccagaggaagcgacag

SEQ ID NO: 239498 - RNA, 75 nt, Homo sapiens
agagaccagaccaaccaagaacagaagcggcagagagggaccggaacaggagcgacagcagggcccgcggcaacc

SEQ ID NO: 239499 - RNA, 70 nt, Homo sapiens
cccccagagcgggaacagggaaagaccaggagaaggcggggaggaagacgacaacagggcagcaggcagg

SEQ ID NO: 239500 - RNA, 69 nt, Homo sapiens
aggaaagcaaccaccagaaaacaggcagcagggaggggggcacagggaaccaggagagacccaacagaa

SEQ ID NO: 239501 - RNA, 71 nt, Homo sapiens
ccccaggggaaaacccccgggaccagggagacaacagccacacaaagcagcaacaggagcagggaagaaaa

SEQ ID NO: 239502 - RNA, 69 nt, Homo sapiens
ggggcggccggccaggaaccacccgaagccagggcccagcaagaaacacaaagggggagagcggagaaa

SEQ ID NO: 239503 - RNA, 74 nt, Homo sapiens
agcgagggggcgcccgccacgacagaccgacacgacgcagcacgaccgcgaagcccagagcacccaaggaccac

SEQ ID NO: 239504 - RNA, 78 nt, Homo sapiens
acgcgggcgcacgggagcccaacacgcggcacgagggccggcccgcgggcagcccgccgcagcaagagagagcaagga

SEQ ID NO: 239505 - RNA, 81 nt, Homo sapiens
gagcgacggcgaacggaaggccacgcccccccgccgccccccagcccgggcgggggcagagccaggccagagcgagaagag

SEQ ID NO: 239506 - RNA, 40 nt, Homo sapiens
agacaaagcaaaaaggaacccgggccgaagggagagggag

SEQ ID NO: 239507 - RNA, 89 nt, Homo sapiens
cgcgacccggcgccgccccgcaacgggagcgccccgggagccgcggagcccggagccccaccagggggcgcccagggccccccgggccc

SEQ ID NO: 239508 - RNA, 44 nt, Homo sapiens
gcgagggagcgagcgggcagcgcgacccgccaggagcgggaggg

SEQ ID NO: 239509 - RNA, 60 nt, Homo sapiens
ccaaccggccacccaggaaaggcccggggaaagcagaacgcccagcacggcagagaggac

SEQ ID NO: 239510 - RNA, 77 nt, Homo sapiens
cgagagccagccacacgaggagacggaaccggagaaaagccggaaaggaaaaacaccagaacggaaacagaaggaca

SEQ ID NO: 239511 - RNA, 80 nt, Homo sapiens
aaggcgcagggggaaacgcagacccaggggagcccaccagccagcaacaggcccggaagacagccaagcggcagagacac

SEQ ID NO: 239512 - RNA, 83 nt, Homo sapiens
cacagaagaagcacaagacaagggccaaaacaggacagaaagaaggaaaaagcagaaagccagaggaagacagagaaaccggg

SEQ ID NO: 239513 - RNA, 37 nt, Homo sapiens
acgcaccccgggcaacccaggaaggaggagcgccgcc

SEQ ID NO: 239514 - RNA, 72 nt, Homo sapiens
caagaagggcgcaaacgaaccgaaaaggcagaaaaaccacagaaacgaaagaaaagacaaaaaacaacgaaa

SEQ ID NO: 239515 - RNA, 86 nt, Homo sapiens
caagaaggggagcagaagcagggcagacaagacccggagggcgagccggcaccagggcccaggcgcacaagagcagggaccccagg

SEQ ID NO: 239516 - RNA, 74 nt, Homo sapiens
gccgccccaagagagcgaggcaacccgaccggaggagcagacggggaccggaagaaacgagcgccagaggaaac

SEQ ID NO: 239517 - RNA, 69 nt, Homo sapiens
cgaagcccccagcgaccagacccgacaggacaaaggccggaccccacagaagacaggagcagccagacg

SEQ ID NO: 239518 - RNA, 88 nt, Homo sapiens
ccagcgccgcgacgggaggagcgccggaacgccgaggcccagacaggccggacacaaccacaaacgagccacgccaaagggcccggcc

SEQ ID NO: 239519 - RNA, 74 nt, Homo sapiens
ggagagacgcagaggggcggcgggggaccccaaaagagagaccagaacccaaagaagggaacaaaagcccaccg

SEQ ID NO: 239520 - RNA, 72 nt, Homo sapiens
gcagaaagcaggcgaacccgcggcgcaaaacgccgggccaagccgcccgcggggaacagaggggcggcggac

SEQ ID NO: 239521 - RNA, 76 nt, Homo sapiens
ggccaaggggaaacaaccaagcgaccacagaaggaaacaacagaacagcaaaagcgaagacgccgaaaacaccggg

SEQ ID NO: 239522 - RNA, 70 nt, Homo sapiens
agacgcagggcgcccccgggcacgacgggagaaacgggcgccccaccccacagccccagacggggcagag

SEQ ID NO: 239523 - RNA, 82 nt, Homo sapiens
ccagccacccgggcggaacaacgaccagagaacgaccggccccagaggaccaagaccaggaaccggaggagaggaccagccg

SEQ ID NO: 239524 - RNA, 70 nt, Homo sapiens
agaaggaccaagaaccagcagcccccgagcgaaagaagaccgggaacaaaggaagaagacaaaagacaag

SEQ ID NO: 239525 - RNA, 34 nt, Homo sapiens
aaaaggccaagaaggcaggccaggcgaaccagcc

SEQ ID NO: 239526 - RNA, 76 nt, Homo sapiens
ccccgacgccaccccgcgcgcgcgcccccgcgcgcccccaggccggagccccggaagcaggacgcaagagcagcaa

SEQ ID NO: 239527 - RNA, 34 nt, Homo sapiens
aaccaacagccccccagggaaggggcgagagaaa

SEQ ID NO: 239528 - RNA, 76 nt, Homo sapiens
caggacaagagaagcacaaaacagcagacccaagagcagcggaaaagaccagcacaggaccacaagaaccaaagca

SEQ ID NO: 239529 - RNA, 76 nt, Homo sapiens
gaaaccaaaaaccgcaccaacgggaacgggacacaccacaggaagggcgaggagagagaacaagaacacagaaaaa

SEQ ID NO: 239530 - RNA, 79 nt, Homo sapiens
cgggccagcgacgggcgagcaccgcagaaggccaagaagacgcggagggaggcgaggagggaccgagccacaccgcgcg

SEQ ID NO: 239531 - RNA, 80 nt, Homo sapiens
ccagagaagagcaagggcacgagcacggggccaaccgccccccagcagcaggcacgggcgaaccccgagccccgccccac

SEQ ID NO: 239532 - RNA, 71 nt, Homo sapiens
cgcgcccgcgcggcgcggggaccgcggcccgagacccagaaccggcggccaaggccgaccaaagacacgac

SEQ ID NO: 239533 - RNA, 81 nt, Homo sapiens
gccccggcggggccggcggcggcgcgcccgggccggggagcaagcgccagagagcgccgccgcggcccccgggagacgacc

SEQ ID NO: 239534 - RNA, 83 nt, Homo sapiens
ccgaagacaagccgcgaccccaagagggagggccagcgcaagcacacacagggccggagcgagggagagcaggaacacagaga

SEQ ID NO: 239535 - RNA, 84 nt, Homo sapiens
gcccagcgcccaaaggcccaaggagcgccggcccccacaaagacacggagaagcccaccacgcaacgggacggcgcggcggaag

SEQ ID NO: 239536 - RNA, 72 nt, Homo sapiens
aacgccgccgccgccacggcgcccacccaacgcgaagacggaacccgggacgacggggacgaagcggggaac

SEQ ID NO: 239537 - RNA, 80 nt, Homo sapiens
ccccaggggcggccgcggcgccgggcgccgagaaagcgccgcgcaaagaggggaaagaccacagcagagggaagcagcca

SEQ ID NO: 239538 - RNA, 76 nt, Homo sapiens
agacacgggccccgacccacgccgagagaagagaaggaacagcgacacccagcagaagcagcaggaaacgaaccga

SEQ ID NO: 239539 - RNA, 84 nt, Homo sapiens
gagaaaaggaagaggcaacagacagaaaaccagcgagggcaggcaagaaagcgcaaggggaacgcacaacacagcaaaggaacc

SEQ ID NO: 239540 - RNA, 75 nt, Homo sapiens
cagaagagaagaacacgagcccacgaaacacagaaagagcagccaaagccaaagaagacgaaaaaagggagaacc

SEQ ID NO: 239541 - RNA, 55 nt, Homo sapiens
gagaaacaccccggcggaggcacccaacaacccaggagagagacgggggcaccag

SEQ ID NO: 239542 - RNA, 85 nt, Homo sapiens
ccacccggccgccgcccgagcgccgagaaagccccgggagaagcagcgccgcccggggcagaccaggcagcccgccaccgaggag

SEQ ID NO: 239543 - RNA, 115 nt, Homo sapiens
ggaggaccaaaccagagggacagagccgggcccgccgaggcccggagggagagaagaacaccccgaagccaggcccaccgccaccacacgccggcaaagaaggaaggcagcgcca

SEQ ID NO: 239544 - RNA, 69 nt, Homo sapiens
aggaaagcccggggggaaagcacacaagaagaaggaaggcaggaacaccagggagcacccaaccgagaa

SEQ ID NO: 239545 - RNA, 35 nt, Homo sapiens
aggggaaccggacgggcagagcaagaaaacaagca

SEQ ID NO: 239546 - RNA, 82 nt, Homo sapiens
ggcccgcgcccggagcggcgccaggccaggcacggccaacaacacgcagggaagaagcgcagaaaacccccagcagaccggc

SEQ ID NO: 239547 - RNA, 54 nt, Homo sapiens
gggcaggccgggccccgccccacggacaaaccggcgaccacacacggggacgac

SEQ ID NO: 239548 - RNA, 34 nt, Homo sapiens
gcacccaaccccgcgaaaagcgaccggaaaacac

SEQ ID NO: 239549 - RNA, 72 nt, Homo sapiens
gcaaggagccaccagcacggaccaggaggcgagcaacagagaaagccaacccagcgaaggaacaagcaaacc

SEQ ID NO: 239550 - RNA, 67 nt, Homo sapiens
aaaaagaagaccaacaaggaaacaacaggaacacggcccaagcacgccaccccaaaggaagcgcaaa

SEQ ID NO: 239551 - RNA, 83 nt, Homo sapiens
gccgcccgccaaccccaggggaccagaggaaccagcccgagcgagaacaggagagggaaggcaaaacaacccgcagggcacac

SEQ ID NO: 239552 - RNA, 59 nt, Homo sapiens
caccaaaaacaaaacgaaccaggacggcaagacaccagcaggaaaacacgggccccaga

SEQ ID NO: 239553 - RNA, 80 nt, Homo sapiens
cgccacggcgccccgcaaggcgacaccccaagagggccgccaccacgaggagcaacccccaaaagagcccagaaagagac

SEQ ID NO: 239554 - RNA, 71 nt, Homo sapiens
ccgaaccacgaccccgccgcggcccccgcaaaacaagacgcagaaaacagacacacagcggagacaagcag

SEQ ID NO: 239555 - RNA, 81 nt, Homo sapiens
ccgagagccagagagagcggacgacagaacccggccgacccggaccaacaaccccaaggaaaacacagaccgggccgaaca

SEQ ID NO: 239556 - RNA, 82 nt, Homo sapiens
gagaaggagacgagaagaagacagaaagaaggaccccagccaccagccccggcagggcggcagcaaaaccaaaccgcagaca

SEQ ID NO: 239557 - RNA, 55 nt, Homo sapiens
gaaccaccagccgcccccccaaaaaaggaacagaggagaaagaaggaagaagaaa

SEQ ID NO: 239558 - RNA, 63 nt, Homo sapiens
cgagcgacaacgggacgggaaacgaagaaacagagcacaaaggcaagcagagacggaaaaggg

SEQ ID NO: 239559 - RNA, 78 nt, Homo sapiens
cagagaggacacgaaacggacaagaaagaagacaaggcggaagaccagcaagccaccccccaaagcagaaggaggaag

SEQ ID NO: 239560 - RNA, 56 nt, Homo sapiens
ccgagagcgcgaaacgcacgagaaggcggagccgcaggggcacggccaccggggcc

SEQ ID NO: 239561 - RNA, 80 nt, Homo sapiens
ggccgaggcacccgcagggcgcccccgagccccggcgccgagcccacagggcagccgagaaggcaacccacagaagggaa

SEQ ID NO: 239562 - RNA, 83 nt, Homo sapiens
ggccgaagaaggggcaagcgcccgcacacaacaacgagaagaccgcgaccgcacaagcagccgccagcggaaccaagcggcgc

SEQ ID NO: 239563 - RNA, 75 nt, Homo sapiens
agagcgagcgagggggggcgcgccggaaaccggagcgcgcagcaggcgaaaagaccagagccgagaagaacacaa

SEQ ID NO: 239564 - RNA, 68 nt, Homo sapiens
agagaagacgacgcaccgcaggcagacaaaagggccaaagaagggagagaggaggaccggcacaccca

SEQ ID NO: 239565 - RNA, 69 nt, Homo sapiens
gacgcgccgccccaccagaagccagaagcgcgcacgcggacggaacagggcgggaaaaaggaaagggga

SEQ ID NO: 239566 - RNA, 91 nt, Homo sapiens
cccgcgccgccagcgccccgccgccaaagccgggggaagcggggcgccggcgcaccggagaggccaggacccgaggggcgagcgcgccgac

SEQ ID NO: 239567 - RNA, 80 nt, Homo sapiens
aaccagggaggcaagacccaggggagaccaggaaggagggccccggagcagccacaccaccgaggccccacccagcacga

SEQ ID NO: 239568 - RNA, 80 nt, Homo sapiens
cccaagcaggacacggccggaccaggggcaacagcaacgaaacggcacggaggacacaaaggccccagggcagaccgaca

SEQ ID NO: 239569 - RNA, 56 nt, Homo sapiens
aggagcgccacgcgcggaaggcagcgcccagcagcgcagcaaaagaacgacacccc

SEQ ID NO: 239570 - RNA, 68 nt, Homo sapiens
cacaacacaaggcagccacaggccaaaacagaggcaccccgagccggcgacccggcagccccagaggg

SEQ ID NO: 239571 - RNA, 67 nt, Homo sapiens
aaacccgcggaaccagcagaagaacaggggcgggaagaagggaagaaacaaacagccgagaaccgaa

SEQ ID NO: 239572 - RNA, 79 nt, Homo sapiens
cagagccagggcagcgcgagacccagaagggacagccaaagaccggagcggagagagaagaaacaggccacagagaaca

SEQ ID NO: 239573 - RNA, 78 nt, Homo sapiens
gacggcggcccagcgagggcggcccggggcacccgcacgggaagcaggcccgccacaggaccgcaagcaggccggccc

SEQ ID NO: 239574 - RNA, 71 nt, Homo sapiens
cgaacccagaccagcaggagaagccccggggaaagaggaggaaaacaaaggcagcgaacaaaccacaaagc

SEQ ID NO: 239575 - RNA, 76 nt, Homo sapiens
ggccaccagcggcagagcgcggaggagccgcgagcgcgagggacgcacccaaggaacgagggggggagccccagca

SEQ ID NO: 239576 - RNA, 78 nt, Homo sapiens
ggggaaaaggggagggaaacacaaacccagacaggcagaaacgccaaccgcgccaacccgaggaccagaccgacaaac

SEQ ID NO: 239577 - RNA, 78 nt, Homo sapiens
ccacacaaggggagccgaaggccccaaagcgggaaagcgcaaagaacccacaggagggccagaggacaaagcacggcg

SEQ ID NO: 239578 - RNA, 67 nt, Homo sapiens
cccgagccaccccaggcgcccagaccaagggaacggcacaggaaagagaggagaggagcgccggggc

SEQ ID NO: 239579 - RNA, 63 nt, Homo sapiens
agcacaccacccgacaagcaaggcgccaggggagaggaggcagaaggagaccgcgggacagaa

SEQ ID NO: 239580 - RNA, 78 nt, Homo sapiens
aggcggggaggcgcccccgggggcccgacgcacacgggggcggacaccacaagaagggcgccagggcccagggaggga

SEQ ID NO: 239581 - RNA, 72 nt, Homo sapiens
cgaccccaaagaacgaaacgcgcaaggccagaagcgcaggcggaggcaagcaagaagagagcgaccaccgga

SEQ ID NO: 239582 - RNA, 60 nt, Homo sapiens
ggggccagcagaggaccagaggggagaaaaaacaaggccaggggagccaacaggaaagcc

SEQ ID NO: 239583 - RNA, 72 nt, Homo sapiens
gcggagggcaagagcgccgaccgggcggcgaggaaggcgccccggagcgcaaaagacaacccacgaaaacca

SEQ ID NO: 239584 - RNA, 80 nt, Homo sapiens
ggcgaagaaggaggcaggcacgggagccgaagcggccggagcgggacggaaggggacacaggcaagaccacacggacgca

SEQ ID NO: 239585 - RNA, 69 nt, Homo sapiens
aaaccgggggaaagaaacccagggcagagcaaccaaaacgaaggaaagaacggaggcacaaaaagaaca

SEQ ID NO: 239586 - RNA, 72 nt, Homo sapiens
gaccacgacgagggcagacgccccggcaaaaggcggagaacggaaaagcaccaggaagcagagaggaccgca

SEQ ID NO: 239587 - RNA, 75 nt, Homo sapiens
aaggggaaggcgcaggagaaaggaaagacaaggagccgggccgagaaaccgaaccagagaccagagaagaaacgc

SEQ ID NO: 239588 - RNA, 54 nt, Homo sapiens
gacaccgccccgagacgaggagccccagcgagccagagggacagcacagcccgc

SEQ ID NO: 239589 - RNA, 92 nt, Homo sapiens
ggggaagggagacagggcaaaggcaagacgggcccagggaagaaggggcaagaaggcaggaaaaaggccagcagggaaccccaacacggacg

SEQ ID NO: 239590 - RNA, 81 nt, Homo sapiens
cgcagccaagaaggccaggggagcggcaggaaggccaccacagggccaacaagcagcgagacccaggacaacagccgaaga

SEQ ID NO: 239591 - RNA, 82 nt, Homo sapiens
cgagcaggaggcgccacaggacgccaaggaggcccgaacggcgcagagcaggagcagacgcgcagggagcaacagccaagcc

SEQ ID NO: 239592 - RNA, 65 nt, Homo sapiens
gcggaaagcacgcgcacagagcacagccagaagaaccacaggccacaacgagccagcccaaaccg

SEQ ID NO: 239593 - RNA, 73 nt, Homo sapiens
agcggggggccacgcgacaagggcaccaagcccgccggaaaaagacaggccagagcagccaacaagaacacac

SEQ ID NO: 239594 - RNA, 61 nt, Homo sapiens
aacaggccccaacccagaggagggagcccaccgcacgcccaggacgcagccaagacacaca

SEQ ID NO: 239595 - RNA, 81 nt, Homo sapiens
ccaaaagggacggacaaaggaacaggaccaggcacggagggcccaggaagcagccaacccccagggaaggaccaaccgaca

SEQ ID NO: 239596 - RNA, 99 nt, Homo sapiens
ggaccggaagcgaccaaggccacgaaaggccaagccggcaagagggaagacacagccacccccgacccaggaaggagcgagaaaaaaggagcacaccag

SEQ ID NO: 239597 - RNA, 74 nt, Homo sapiens
gaaaccggaagacccggacccaccacaccgagcacaggcccccggagggagggccagaaaggccgaggaagcgc

SEQ ID NO: 239598 - RNA, 79 nt, Homo sapiens
accaaagcgacacacgcacacacagaaaaggcccagaaccgagcaggagcaaggaggaaaacgcacaggacaaagcaca

SEQ ID NO: 239599 - RNA, 74 nt, Homo sapiens
acggcagaccgcccgagcgccccaggagaacaaaagaaaaagggaggcaaggaagcggagacgacaaagcggac

SEQ ID NO: 239600 - RNA, 82 nt, Homo sapiens
ggaccgggagggaacgccgcggacccggagccgcacaaaccagggccgccagaagccagggccgggccaggcggaaagcagg

SEQ ID NO: 239601 - RNA, 59 nt, Homo sapiens
ggcagcccccccagacagggcagaccgaggagggaccgaggaaccacaagcagcaaggc

SEQ ID NO: 239602 - RNA, 57 nt, Homo sapiens
gcggcgcggggccccgcggcggagaacggccgagcgaccaggagaggagcccccgcc

SEQ ID NO: 239603 - RNA, 64 nt, Homo sapiens
cacggcgccccgcaaggagccgggaacgacggccccagcagcggcccggacccggcgccgaaga

SEQ ID NO: 239604 - RNA, 74 nt, Homo sapiens
agaaacaaaaagcgaggaaagcgacaacaggcagagagcaagaggcgaagcacggcacaagcaccccgcccaag

SEQ ID NO: 239605 - RNA, 97 nt, Homo sapiens
cgaaggagccagcgagggacggagcggagcagaccgaaagagggacacaaaagcaaccgagagggaaacaaccacgcgaaaaggagacacagcacaa

SEQ ID NO: 239606 - RNA, 78 nt, Homo sapiens
agaccgagcaccagaaggcgacccggcaaggaggaaccggcaacgcaagcgaagaccaaccacaggccacacaggcac

SEQ ID NO: 239607 - RNA, 75 nt, Homo sapiens
ggacaagagaaggaccgaacaccaaaaaagaaaaagcgagcccacccccacaccaacccccggaagagagccaac

SEQ ID NO: 239608 - RNA, 68 nt, Homo sapiens
ggaagcaggggaaagcccgggccaagcgggaggcgccacaagagagggcggcagaaggaacaccgaga

SEQ ID NO: 239609 - RNA, 55 nt, Homo sapiens
acaaacgccacgaaaaagcacaagcggcgcgaggaaggccagaacacaaaacgca

SEQ ID NO: 239610 - RNA, 79 nt, Homo sapiens
cgcccccgacaaacaagacgaccggagaaggacacgaggcggaagcgcaaggcaagacagaagccgaaccaggccacaa

SEQ ID NO: 239611 - RNA, 77 nt, Homo sapiens
agcggcacccaagagaaaaggagaacggagacaggaggagacacaaaacagaaaaagacaagcaaggcggagggcag

SEQ ID NO: 239612 - RNA, 72 nt, Homo sapiens
gccggcaaccccgccgccgggcaagcgaccggcccagcccccagcagcgggaacagaaggccggcccacagc

SEQ ID NO: 239613 - RNA, 74 nt, Homo sapiens
agcggcggcgaagaaggaggcaggcacgggagccgaagaggcagagaacgagggacaagagccggacagaagag

SEQ ID NO: 239614 - RNA, 71 nt, Homo sapiens
agaagcggaaaagagaacaaaaaaaagaaagagaagcacacaaacaagcagcgagaggaaagagaaagaaa

SEQ ID NO: 239615 - RNA, 79 nt, Homo sapiens
aaaacacaaggacaccaggcacgagagggaaagggcgggggcaagacccagagaagacaaaacaacaggcgaaaaagac

SEQ ID NO: 239616 - RNA, 73 nt, Homo sapiens
cagccgggcaggggccagccccccacaacccagccagccaccacagcaggacacacagacggagccgccggcc

SEQ ID NO: 239617 - RNA, 74 nt, Homo sapiens
cagagccaggacagggcgaggaaccagcccaccccgaccgcccccgcggaacacagcagaaccaggagaccgga

SEQ ID NO: 239618 - RNA, 79 nt, Homo sapiens
agccaccagcagccgagcccggcgccaccgccagccccgaggacgcggcgcccacgagagccaagcaagacccccccaa

SEQ ID NO: 239619 - RNA, 70 nt, Homo sapiens
cccagagagccacccacaagacgccacaggccggcaacgccagcaaccgggcggcgagaggggcgaaggg

SEQ ID NO: 239620 - RNA, 73 nt, Homo sapiens
acgccggaccagcaaggcggccaaggcgagccaaaagcggaacccagcgcagaacggcgcagcgcccgccacc

SEQ ID NO: 239621 - RNA, 65 nt, Homo sapiens
ccagaaacagaaccagccaggaacagacacaaccaagggcacaacaagccagcaacagaacccca

SEQ ID NO: 239622 - RNA, 79 nt, Homo sapiens
agcccagaccaggaggcaaagagcagcggacagggacccggcgcggcgggcgccacccaagacgcaaacccccgaggac

SEQ ID NO: 239623 - RNA, 88 nt, Homo sapiens
cccggaaaggaccgccaccccccgcgcggcgggggacgcggaaccagcggagaaacgcgagagcgcacaacagagagggccgcagcag

SEQ ID NO: 239624 - RNA, 76 nt, Homo sapiens
agcacaagacggcagacgaggccgaggccacccggcaccccagcccgggggcggcccaggcccgaccccgaagaga

SEQ ID NO: 239625 - RNA, 82 nt, Homo sapiens
cccaggccgaccacagaagcagaagggagccacgggcaggggagaaggaagccaggaaaggcgacggggagcccagaaagaa

SEQ ID NO: 239626 - RNA, 69 nt, Homo sapiens
acgagcccaggccacagacccacacgccggcggccaagaggcgcggccagcgaagaagacgcagccaga

SEQ ID NO: 239627 - RNA, 64 nt, Homo sapiens
aggcacccagccacacccgaagcaggaggggaaggcgccgcccacgacggacagaaaaagacaa

SEQ ID NO: 239628 - RNA, 49 nt, Homo sapiens
gggaccccggagcccagaagacagagggcgagggagcaaggagacacgg

SEQ ID NO: 239629 - RNA, 77 nt, Homo sapiens
gcccagcagcccaggggaaaggaacacccccagcggccagacgagccacaggagcccggcccacgcgggaacgagcc

SEQ ID NO: 239630 - RNA, 66 nt, Homo sapiens
gggaggagcgggacaccccggaagcgggaaagcggacagaaagcaccaaaaccagaagacagagag

SEQ ID NO: 239631 - RNA, 75 nt, Homo sapiens
cgacccggcgagcgggcaagcgggaaccaggggccacccgggcggacacaccgaagaacaggaggcccagagcca

SEQ ID NO: 239632 - RNA, 70 nt, Homo sapiens
ggaaagcagaagaaggagcggaacacacagcaagccgccgggacagccacgacgaaggcagagggggcga

SEQ ID NO: 239633 - RNA, 98 nt, Homo sapiens
agggcaaacgccggacagccacaaagacccccagacacacacacccaacccaaaccaaggaacaagacaacacacacgcaccagggcagaaaaaggga

SEQ ID NO: 239634 - RNA, 72 nt, Homo sapiens
gaaccgcggcccgagccgagccagagcagaaagagaaggcagaacagaggaagaccagaaacccagagaccc

SEQ ID NO: 239635 - RNA, 73 nt, Homo sapiens
caagcccagcaagaccaaacagccaaaccagacaggaggcacaggaggaagaccacgcggcaagcaaaaagga

SEQ ID NO: 239636 - RNA, 83 nt, Homo sapiens
cagcgagggcggcccggggcacccgcacgggaagcaggcccgccacaggcgacagaggaggcgaaacgaggaggaagcgagag

SEQ ID NO: 239637 - RNA, 90 nt, Homo sapiens
cacagcccgcgcccgccaggcgacaggggaacagacagaaggagcaggaaccaaaggacgagaggaccgccgaagagcaccagagcgcac

SEQ ID NO: 239638 - RNA, 79 nt, Homo sapiens
acacgaaacccagcaaggaaacgaaaaagaacgggaaacaaggaagccccaagcccacagaacaacaaccagacgaccg

SEQ ID NO: 239639 - RNA, 74 nt, Homo sapiens
acaagaagggcaaagccgaagccaggcacacagaaggccaaaacccgcaaacacgagagaaaagaaagagagac

SEQ ID NO: 239640 - RNA, 74 nt, Homo sapiens
ggccagcgaaaacgcccagaccacagccgcgcccagaacgggagccggggagcacgggggagggccgacacccc

SEQ ID NO: 239641 - RNA, 72 nt, Homo sapiens
aaaccacggagacagaaaggcagaaggaagaagaagaaacaaaaagcggccaaaggggaccaggcagacaaa

SEQ ID NO: 239642 - RNA, 80 nt, Homo sapiens
gccccaccgcgggaagaaagggagcaagcccggcgagccagacagaaggccaggcgagacgcaacacgccacaccccgcg

SEQ ID NO: 239643 - RNA, 91 nt, Homo sapiens
ggagaagacaccagcagcagcccagccagggcagggggagagcgcagcgcagagccgacaaaaggacaaggggcgaagcccgggggagagg

SEQ ID NO: 239644 - RNA, 79 nt, Homo sapiens
caggcagaaggccccccgaacagcaggcgccaccagcccggagaggcgcccgcccaggaggacagcgcgggagcgggag

SEQ ID NO: 239645 - RNA, 91 nt, Homo sapiens
ccaaccgcaaccagacgccagcgggacgaggaccgagaccgcggccgggaccgaggaccagagacaaggccccgagggaggagcccgaagg

SEQ ID NO: 239646 - RNA, 64 nt, Homo sapiens
ccccaaaccggaccgccccccaagagcgccgcgcccggacaccagcagcgcaaaacaccaggag

SEQ ID NO: 239647 - RNA, 73 nt, Homo sapiens
ccacaacggagaaaaaagcggcagccaggacagagccagaggaccccggacaaacacagcggaacaaaggggc

SEQ ID NO: 239648 - RNA, 70 nt, Homo sapiens
cacagagggaagaccccaaggcccccgcgggcgcacacaggaaggcggagggaagaagggaaaacggaga

SEQ ID NO: 239649 - RNA, 82 nt, Homo sapiens
cagagacaggccagagggggccgccgcggcagcaagaacagagagagaggggacagacgagagaacgagcgagcaggcgacc

SEQ ID NO: 239650 - RNA, 54 nt, Homo sapiens
caccgcaaaggccccagcggcccaggcccccccgggggcgagaagaaacggacg

SEQ ID NO: 239651 - RNA, 55 nt, Homo sapiens
agccacggcagacacacaacccgacccgacgaaccacggccggaccgagagcccg

SEQ ID NO: 239652 - RNA, 56 nt, Homo sapiens
gagaagcacggggcaaagcacccacacagcagaacaagccccgcagagcgagacgc

SEQ ID NO: 239653 - RNA, 85 nt, Homo sapiens
gggccgcgggcgccaggaggggggcgacaagggaccaacacgagcggaaaggcccgagccaaaagacccagagaaaggagcacga

SEQ ID NO: 239654 - RNA, 85 nt, Homo sapiens
ccccccgaggaggacccagagcaggacagcggcccggaggaccgccccgcagggagaagagccaaggagaccaaacccagcagca

SEQ ID NO: 239655 - RNA, 66 nt, Homo sapiens
cagggcaaggagccaggaaggaggaggaaaaaaggagcaaaaggaacacaccgagaaacaaggcac

SEQ ID NO: 239656 - RNA, 91 nt, Homo sapiens
caaccgggccggccccagagcccaccgggaggagaaggaggaggaacggggccaccacagagcccgcagggacacagcagaacaagcaacc

SEQ ID NO: 239657 - RNA, 80 nt, Homo sapiens
acccaagcaggaggcaggcgccaagggcacagagcgaggaggacgaccgcagcccagaacccccaggacagacgaccccc

SEQ ID NO: 239658 - RNA, 81 nt, Homo sapiens
cgggaccggcgccacagcagggacgaggagcgccgccgccccgagcccgagggaaagcaggcaggggacccccaccacacc

SEQ ID NO: 239659 - RNA, 58 nt, Homo sapiens
cacgaagaggcggcgcgaggacgggcccgagcgcggagggccagacaaggggaacaca

SEQ ID NO: 239660 - RNA, 69 nt, Homo sapiens
cccagccagcaagccagcaaggggagcaagaaacgcaacacggagacggaggcgggacccagagagcca

SEQ ID NO: 239661 - RNA, 70 nt, Homo sapiens
ggaccgcacccgcggagacggacgcccggaaaagaccgggcccagagcaagaacagggcaccgggagaag

SEQ ID NO: 239662 - RNA, 88 nt, Homo sapiens
gcagcagcagcaggaggggcagcaacaaggagggaaaaaagagcaggggaaaaggaaagggcgaccaaggaaagagccaaaagagcca

SEQ ID NO: 239663 - RNA, 68 nt, Homo sapiens
ccaggaaaaagacagcccgcagcacgaccagcaggaacggcccagagacaaaggcaggacggacaccc

SEQ ID NO: 239664 - RNA, 47 nt, Homo sapiens
caaagagccccgagcaccacgcaagccccagagcgcacccacagccc

SEQ ID NO: 239665 - RNA, 73 nt, Homo sapiens
agaaccgagcaacaggcagaaaccaggcgcggcacccaaaaaaaaacgcacgcaaggcgcaaaagggaagaac

SEQ ID NO: 239666 - RNA, 88 nt, Homo sapiens
agcggcagggcaccgcgcgaagcggccaaagccgcccagacggccaccggcgggaggaacaaaaggccggacacccaacagcacgcag

SEQ ID NO: 239667 - RNA, 57 nt, Homo sapiens
agccggagggcgggaggaacagacacgcggagcaaaaaagaaaccggaacaccacca

SEQ ID NO: 239668 - RNA, 83 nt, Homo sapiens
gagcagagagcggaaaacggcgcagccaacaaggggccagcgcagaagacgagaagccaggaggagaagcggcccggcaagaa

SEQ ID NO: 239669 - RNA, 70 nt, Homo sapiens
ggcggggcccagaacccagagaagcggggagcccggaaggcgggcaaaggacacacacagagccaagggg

SEQ ID NO: 239670 - RNA, 78 nt, Homo sapiens
ggacacaccgcagcagccagagcgcccagagagcaagcccggaggcacccaagaagcgggcgagggaagcacacaagc

SEQ ID NO: 239671 - RNA, 69 nt, Homo sapiens
aacgcgggagaaaggcccacgggacggaggacacagcagaaaggagaccagggcagggggaaaggggcc

SEQ ID NO: 239672 - RNA, 63 nt, Homo sapiens
gaggcgaggcacagaccaagggcgaaccaaagaaggaaggcgacccaaaaccacgaagcacag

SEQ ID NO: 239673 - RNA, 55 nt, Homo sapiens
aagaacaccaaaaaccaccaaaccagcaaggaacgcacggaaagaaaacaagcca

SEQ ID NO: 239674 - RNA, 74 nt, Homo sapiens
ggggcccagcaaagccaaaggaaggaccaggaaaagagaaggggcagaaggaaggggaccaagccaacccacag

SEQ ID NO: 239675 - RNA, 69 nt, Homo sapiens
ccgggcagaaaccgggaaacaacaggagcccagcaaacgaacacaagagacagggaacaccagaccgga

SEQ ID NO: 239676 - RNA, 74 nt, Homo sapiens
gggcaggacgagcagccgccgggacggccaggaacggggcgggccaagcagagcgaccaagaagggacagggag

SEQ ID NO: 239677 - RNA, 51 nt, Homo sapiens
ccgaaacaggcgaacggcgcgcagggcaccggcgggcacgcgagaagggaa

SEQ ID NO: 239678 - RNA, 89 nt, Homo sapiens
gcagcagcggcagcacaggcacacagcaaagaggcgaccacgagaaacaggcaaccagcgccgccccaggacaaccccccacaacaagc

SEQ ID NO: 239679 - RNA, 76 nt, Homo sapiens
gccaagaggaggacagcgcacacagcaagcacgagggggacgaccaccagccaggccggggacaaacaggcaaccg

SEQ ID NO: 239680 - RNA, 61 nt, Homo sapiens
ccgagaggcagggagcggcgaggccgaagaaggaagagagaagggcacagaccaagacaac

SEQ ID NO: 239681 - RNA, 71 nt, Homo sapiens
ggccaggaacgcagaagaccgcaggggaaaaccaaagaccgacaagacccgaaacccgaccgccccagggg

SEQ ID NO: 239682 - RNA, 73 nt, Homo sapiens
gggaagccgcggccccaagcaccagcccacggcgcggggcagagcacggaggcagcagagagaggccagcaac

SEQ ID NO: 239683 - RNA, 67 nt, Homo sapiens
gaccacgcggccgagaggaccgaaggagaagaaggagaaggggaggagaaggcaagccggaaagagc

SEQ ID NO: 239684 - RNA, 74 nt, Homo sapiens
acagaagagaaggggccagagaaccggccccgagaacaaaagaagcagagcgaagggagaccagcgaaaagggc

SEQ ID NO: 239685 - RNA, 77 nt, Homo sapiens
cagcccggccgcccagaccggccaggggacggcgagcaccgggcggagcaggagcaagcacagaggacccgaaaccg

SEQ ID NO: 239686 - RNA, 39 nt, Homo sapiens
cggcgagggcgccacggcaggggagcgcagcacccaggc

SEQ ID NO: 239687 - RNA, 60 nt, Homo sapiens
cacgggaggggagaaggacgggaaccaggcgaaaagaaggagaagccccgcagaccaagc

SEQ ID NO: 239688 - RNA, 81 nt, Homo sapiens
ggcggagcgacgagcaggcggcgcagacaccaacgcgggcgcgaccgggagcggaccccggggggccccggcgcggagcgg

SEQ ID NO: 239689 - RNA, 82 nt, Homo sapiens
cccagacaaggaaaaaccaaggaagaaaaagagcgcccaaggccacacacaaacccgagacgcggcggggcgggaaagaggc

SEQ ID NO: 239690 - RNA, 97 nt, Homo sapiens
cagcggcccgcgcccgccgggccaccgcgcccgcccagccccgcccgaaaggggagcaagaagaaagagcagggaggagggagcgacaggaagaaag

SEQ ID NO: 239691 - RNA, 60 nt, Homo sapiens
cggcgccaccaccagcaccagggaaagaacgccggacaacagcggcgaagaaggcaaacc

SEQ ID NO: 239692 - RNA, 80 nt, Homo sapiens
caacagggaagcacaaggagggaaggacaagcccacaaggcaggcagaggggcagaggcaaccaacacaaggacagagac

SEQ ID NO: 239693 - RNA, 79 nt, Homo sapiens
aggacccacggcgcgcgaagagagaacccaccgcaagagaccaaaggccaagagcaccgcagccaccagcccggaaccc

SEQ ID NO: 239694 - RNA, 96 nt, Homo sapiens
gcggcaggcgaagccccggagaaccacccggaggagacggggcagacaacggagcccgggagacagagacaggagcggcagacaggagaagacggc

SEQ ID NO: 239695 - RNA, 73 nt, Homo sapiens
gaaaaaaggacagaggcgcccaggcagaccccagaggccaaaacccacaacacccagcggacaaaaagaccgg

SEQ ID NO: 239696 - RNA, 70 nt, Homo sapiens
caccccacggaggaacaaaaccgcaggggggaaccccgacagcagagacgacgcggcaagcagcggaaga

SEQ ID NO: 239697 - RNA, 89 nt, Homo sapiens
ccaccacaacccaccacgccgagggcccaccccaccagcgagggcgccccgaagcgagccagggaggcggcccccagcagccagaggga

SEQ ID NO: 239698 - RNA, 67 nt, Homo sapiens
ccaggcacgcaaccgcccaccgcccacacacagaaggggagaagacacaccaggacaaaaacacgga

SEQ ID NO: 239699 - RNA, 78 nt, Homo sapiens
cagcccccgagagcggaacacagagacaccaccagaaaaaaacacaagagcagaagagaaaccaacccacccacagca

SEQ ID NO: 239700 - RNA, 78 nt, Homo sapiens
agacaaaagaagaccaaaacgaggcacaaaaagcagagcacggccagaagagaaggggaggcagagagcacagccccg

SEQ ID NO: 239701 - RNA, 73 nt, Homo sapiens
caccaccaacgccaaacaagcagcacagagccaggaccaaccagacgccgacacgcagggccaagagaaaaag

SEQ ID NO: 239702 - RNA, 74 nt, Homo sapiens
cagcacgacccgagagcacagaaaaagaggcggccagacgaagaagccagagcggcggaccagcggcgcagagc

SEQ ID NO: 239703 - RNA, 61 nt, Homo sapiens
gcaccagcggcgcgcccaaaaggcagacgacaagccaaggagaccgggagagagacgaagg

SEQ ID NO: 239704 - RNA, 76 nt, Homo sapiens
cgggagaaggcgccagcaaacaaccacgcacggggcaagcgacaagccaaaaaggaggagagaacccggacccaga

SEQ ID NO: 239705 - RNA, 75 nt, Homo sapiens
agcgacggggaggcgcggccaacggggccacaagaaaggaccaagacagcaggaacgaaccaaacccgggaacac

SEQ ID NO: 239706 - RNA, 53 nt, Homo sapiens
gaaacagaaaaggaaccgaagaagcaaagcgacacaaagggcagcgacaccca

SEQ ID NO: 239707 - RNA, 70 nt, Homo sapiens
cggcagggcagggcaggaaggggaaaccacccagaaaggaaacgccagaggaagaagcaagccacaagac

SEQ ID NO: 239708 - RNA, 77 nt, Homo sapiens
cccaacaaccagggcaaggcgcagaacagccagcagaagcacaccaacgacaggcccgaaagaaggcgagcacagga

SEQ ID NO: 239709 - RNA, 81 nt, Homo sapiens
gccggggccgacagcccgccgggacgccggccgacgggacaccaagagcccaaacgagaaggaagccgcggaggaccgagc

SEQ ID NO: 239710 - RNA, 102 nt, Homo sapiens
aggccgcggcccgggccgcaccagagcgcccggcccacgacacaggaagaagacagaagcccacaggggcaacacagcccaacgccaaacacggacgcacac

SEQ ID NO: 239711 - RNA, 70 nt, Homo sapiens
ccagggcgagagagaagagccccaccgggaccagacgcggccgagagaccccaggaagccgaccaggggc

SEQ ID NO: 239712 - RNA, 78 nt, Homo sapiens
aagggaacacagcacgagaccccccgcgagagcgcaaacacccccagacaaagacagccagcaaagggggagagcaaa

SEQ ID NO: 239713 - RNA, 65 nt, Homo sapiens
gggagccggagggaacagcagggcaaagcaacagccaaaaaacagccgcaaaggaccccaccccc

SEQ ID NO: 239714 - RNA, 72 nt, Homo sapiens
aaaaacaaaaaggaccgcggcaaacccaccacaccggacccaaacaacaaaaggaagaggagaaaacaaaag

SEQ ID NO: 239715 - RNA, 71 nt, Homo sapiens
gcaaacgcgcaggcacaaagaccagggaacaaaaccggaccagcacgacgcagaaccggccgaaaagcaca

SEQ ID NO: 239716 - RNA, 125 nt, Homo sapiens
gcggaccagccccagggcagggacgcggccccggggcggcggcgcggcgacggcacccggggcccagagcggaagcaagcgcacacagagaccaggccgggagaaaaggaccaaggagcaggccc

SEQ ID NO: 239717 - RNA, 78 nt, Homo sapiens
agaggaagcgccgccaggcccgcaggaccgccggagacagggcaacggcagcagaagcagcggccaagaacccaggca

SEQ ID NO: 239718 - RNA, 59 nt, Homo sapiens
gccccaccagcacggcagcccaggacacgccaccacaccgacccacgacaagaacggag

SEQ ID NO: 239719 - RNA, 78 nt, Homo sapiens
agagcgccgccccggagggaaaaccagaggaagacagaagcaaaggcgcccagcccggccccgggcccacaggcagcc

SEQ ID NO: 239720 - RNA, 78 nt, Homo sapiens
agcacaggagggcaggcaggaagccaacacacccacaaaagcgaaaagccagacaggaacaccagacagaagaacgcc

SEQ ID NO: 239721 - RNA, 71 nt, Homo sapiens
aacaacagaacgaagcaaaaaaagacacccaggcaaaggaacggaaaggcaagacccagagaaaggaacaa

SEQ ID NO: 239722 - RNA, 73 nt, Homo sapiens
cgcacaggcgcaggagcgcggcagggacccagcggacaaggaaacggggggggcccagagagcagccaaggag

SEQ ID NO: 239723 - RNA, 70 nt, Homo sapiens
ccaccccggaagaccaaagagaagaggcaaaacaaacacagaagcggggaaagccagggagaagacaaga

SEQ ID NO: 239724 - RNA, 98 nt, Homo sapiens
gaaggcgcggagaccacgacgggggggaggcggcagcgcaaccacgagacggccccaagggacagagagccgaaagccgggcaaggggaaagaaggcc

SEQ ID NO: 239725 - RNA, 70 nt, Homo sapiens
agaaacggaagcacaagaccgcccggggaacagggcagcaagcgacagcgagacagggaaacgggaggcg

SEQ ID NO: 239726 - RNA, 54 nt, Homo sapiens
gaaacagccggcaggacacagaagaacgcagcccggggagcagcaccccacagg

SEQ ID NO: 239727 - RNA, 74 nt, Homo sapiens
agccgcagcggaaagcaggagcacagacaagccgagaccaccaggagcagagcggaggcaaccagccaaaacaa

SEQ ID NO: 239728 - RNA, 74 nt, Homo sapiens
ggaccgcagcccgggcaagacacacgagaacggcagaaagagacagagggaagaaacagacgcggagagaagag

SEQ ID NO: 239729 - RNA, 71 nt, Homo sapiens
ggagcggcgaagagcaaccaggcgaaggagcacgcaagcagggaaaagggcaggaaaacacccgaaaaaaa

SEQ ID NO: 239730 - RNA, 108 nt, Homo sapiens
gaggcggcggcggcggcgcggaggcgcaggcagcaacgaggcagcggcaggccagggcagccgcggacacgagaaagcccgcccccgcaaggcggcagagcgcaacaa

SEQ ID NO: 239731 - RNA, 73 nt, Homo sapiens
gaagccagcccccaggcggaacgcccgccccgcagagagccgagagcagaaacacaacgggaggcgagggacc

SEQ ID NO: 239732 - RNA, 107 nt, Homo sapiens
aggcggccaaccgacaggcagcccgaacacaggagaacaccgaagacaagcccaaagaaaggacggaaaaggagaggacacaccccccagcaagaccagaagaaaca

SEQ ID NO: 239733 - RNA, 74 nt, Homo sapiens
cgggaagcccagggcagaacacagggggaggacagcccaagaacaccggggaaagaaaaggcccgagaagcggc

SEQ ID NO: 239734 - RNA, 69 nt, Homo sapiens
aacaaagcccgaacagcagcagcgcgagcgacaacgggacgggaaacaaacaacgaacgagcaaggaag

SEQ ID NO: 239735 - RNA, 70 nt, Homo sapiens
agcaaagagcagaagagcagcacacccagccccaagagcaacagcgccacgcagagccccgccaggaaga

SEQ ID NO: 239736 - RNA, 84 nt, Homo sapiens
gaagacagcaaaagcccgaagaaggcaacagaagaggcaaaagaaccgggaagggggacaggagcagcagacagaccaccaaag

SEQ ID NO: 239737 - RNA, 79 nt, Homo sapiens
gccggacggaaagcgacaagggaggcgccgccagcggccgggaccgaacaggcgacgcgaccggaaaggagagagagac

SEQ ID NO: 239738 - RNA, 57 nt, Homo sapiens
agccagccacacgaggagacggaaccggagaaaagaagagggaccaggggagacggc

SEQ ID NO: 239739 - RNA, 93 nt, Homo sapiens
ggacccagccagaaccaacccacaccagaaaggacacacaggcaaaagcagaccggaaaacccaccggcaagaccacacccgaggggagccca

SEQ ID NO: 239740 - RNA, 54 nt, Homo sapiens
ggaggcacaccaaaaacagggcaccaacggacggcgaaaaaggacacagacacg

SEQ ID NO: 239741 - RNA, 83 nt, Homo sapiens
gggggcgcagaggacacgaggcggcgggcggagacaggaccgcggcgagcaagggacgcagcccaagaggaggcagggaagcc

SEQ ID NO: 239742 - RNA, 78 nt, Homo sapiens
gcaccagaagcaaaagaaaaggagccgcggggaggaggcgaagccacacagagggcaagccggagagaagagagagca

SEQ ID NO: 239743 - RNA, 64 nt, Homo sapiens
caaccccagaaggcaacgcgccgcaaaacagaacgcgagcccaaaaggcagagcgaggagagaa

SEQ ID NO: 239744 - RNA, 61 nt, Homo sapiens
gaagcgccgccgaaggcggcacggacagagccacagacagacagggcaccacggaggaaag

SEQ ID NO: 239745 - RNA, 78 nt, Homo sapiens
ggaagcccagcgcggagccggccgcggcccccggggcgcggagaggacaagccacacaagaaggagaaaaaaaagaga

SEQ ID NO: 239746 - RNA, 77 nt, Homo sapiens
acagcggaagacgcagagggagacaggaagggaacgagcagccccagaggacacaaccccaaacagagcccaaaacc

SEQ ID NO: 239747 - RNA, 62 nt, Homo sapiens
ggaagcaggggaaagcccgggccaagcgggaggcgccacgacacaagcccacacaaggaccg

SEQ ID NO: 239748 - RNA, 64 nt, Homo sapiens
ccaaccaagggcagaaggaaaggcagaaaaggaaccaccacccaccgaagggggacgaagaccc

SEQ ID NO: 239749 - RNA, 75 nt, Homo sapiens
ggcgaggcgcagaaaccccggacaaggcacgccagacgggggagcaggaaagagagaagcggcccgccggcaggc

SEQ ID NO: 239750 - RNA, 58 nt, Homo sapiens
aaacagaggggccaaaggaggagaaggcgggaagacggagcagccagagcagcagcag

SEQ ID NO: 239751 - RNA, 52 nt, Homo sapiens
aagagaagcaagggccccaagcgcacagggacagcgccagccaaggcaagca

SEQ ID NO: 239752 - RNA, 51 nt, Homo sapiens
ggcggcggcaaaacaagaacagcagccaccggaagagaaaaccaagaacga

SEQ ID NO: 239753 - RNA, 76 nt, Homo sapiens
cagcccaaggacacaaggaaagacacagcccggcaggcggggaaacgccggagagcaagaaaaagcaggcaaacaa

SEQ ID NO: 239754 - RNA, 86 nt, Homo sapiens
gaacgcgaacccaggaggcggaggcgcaggaggccacacagcagcagcagaaggccaaagacagagaccccgccaccagagaccgc

SEQ ID NO: 239755 - RNA, 83 nt, Homo sapiens
gccagcgcgcccgggccagggaagggccccggagccaggacaggcggaccccgccgcacaagccaacaccgggaggaggagag

SEQ ID NO: 239756 - RNA, 79 nt, Homo sapiens
ggaaaggagaaaaggcgagggccggggaggccacccacgccccagaaacacccgaggaggcgcaaaagagggaaaacca

SEQ ID NO: 239757 - RNA, 84 nt, Homo sapiens
gggcggaccccggggccaggccggaagcagaccccagcagcagagacgcagccaaacaggaagcaaacagcgagcgccccgagg

SEQ ID NO: 239758 - RNA, 68 nt, Homo sapiens
aaacgcccagccaaacaagagacacacgagaaaaaaccgagaaaagacccagcaggaaacaagccgga

SEQ ID NO: 239759 - RNA, 89 nt, Homo sapiens
gggcggcggacacaagcaggacgccccacacacggcagggcggcccaggcagaaagccgcggcaccggggcagccaggcagccgcccgg

SEQ ID NO: 239760 - RNA, 82 nt, Homo sapiens
gagaagccgaggagaagaagagaacccacagagacacccaggaacagcggaggaggacagaagcacccaacaggacgccaag

SEQ ID NO: 239761 - RNA, 73 nt, Homo sapiens
gagccaagccgcgggcaacaggagccgagaacaagccagccagaggagaagaaggagccggacagagcgccgg

SEQ ID NO: 239762 - RNA, 60 nt, Homo sapiens
agcagccaccaggagcccgagagagaaggcaccaacaagacgcaaaaccagcaggccgcg

SEQ ID NO: 239763 - RNA, 39 nt, Homo sapiens
gacagagaggagacaaaaccccagaccccccaccccgcc

SEQ ID NO: 239764 - RNA, 84 nt, Homo sapiens
gaaaaggaaacagaagaacgggcagcccggcagcccgagccgaccaaagacaccgaaggaggaggcgcagcccagagggcaccc

SEQ ID NO: 239765 - RNA, 76 nt, Homo sapiens
aacaagcaaaacaggcgacagcagaaggaaaaccacacacaggggagcgaaggaggcccaggcgcggaggaggaag

SEQ ID NO: 239766 - RNA, 73 nt, Homo sapiens
gcaccaggggaacaaggcaagggggggcacaaaagcaacacgcccggcgaccacaagaacaccaacaagagaa

SEQ ID NO: 239767 - RNA, 75 nt, Homo sapiens
gagacagcaaccggccacgaggagggcgcccagcaggaaacgaaggacaacgaaagaagaacaaacaccaacaaa

SEQ ID NO: 239768 - RNA, 73 nt, Homo sapiens
accagccaagacagacgcaacgcagacagacaagaagaaacgggacaccaagagggcccccgccacccagcac

SEQ ID NO: 239769 - RNA, 80 nt, Homo sapiens
ccccagggcagcaggggcggccaccccaaccagaaaggcacccgaaaggggaaggaaaagaaggaagaacaggcacagcc

SEQ ID NO: 239770 - RNA, 85 nt, Homo sapiens
cggggcagcgggccggcgccggcgcgggccgacgccaccgccgagcccagaccggaacagacggggggccaacaaagaagcagga

SEQ ID NO: 239771 - RNA, 57 nt, Homo sapiens
ggccgacccgccagaggaggccccccagccacggaaacggccccggcaaccaaagac

SEQ ID NO: 239772 - RNA, 65 nt, Homo sapiens
cagaaccccgaggaggagagcaccagaggcaagcacggaacggaaacagaggcggaggcggccgg

SEQ ID NO: 239773 - RNA, 84 nt, Homo sapiens
gcgcgccccgccgcgaggagcgcgccacccaggggcgggcccccgccgcgcgcggcgccaagcggaccacaccagaaaaaggga

SEQ ID NO: 239774 - RNA, 83 nt, Homo sapiens
gcgggcgagcggcggggagcggcgaagccgcgggcgagggcaacgacaggggaaccccagggaccagcggacaggacaggggg

SEQ ID NO: 239775 - RNA, 79 nt, Homo sapiens
gggccggaggaacaagagacacagacgcaaacagaagaagcggaaaaagcaccaggagacaaagccacaaaaacaccag

SEQ ID NO: 239776 - RNA, 80 nt, Homo sapiens
gaaggacacaaagagaaccaaaccaagcaaagggggacagggcagggccccgaacaggggagaccacacccaaaacgaaa

SEQ ID NO: 239777 - RNA, 75 nt, Homo sapiens
aaggaaaggagcaacagaaggaccaccgggccgcccaccaggaggaaggaaacgaaagggaaacaggaaaaggaa

SEQ ID NO: 239778 - RNA, 83 nt, Homo sapiens
aggggaggcgggccaggacacgagggcgacccgggggccggaggcgccaccgcgcgccgcacaggacagcaaaggccagacgc

SEQ ID NO: 239779 - RNA, 68 nt, Homo sapiens
ccaaagaagcaaaaaagaaacgaagcggacaacagcagcaaggggaggagacagaggggagaggcggc

SEQ ID NO: 239780 - RNA, 74 nt, Homo sapiens
ccagaccccccagacaccaacagaacacaagggagggaaggagaagcgaggacaggcaaagcgccacgagcaga

SEQ ID NO: 239781 - RNA, 82 nt, Homo sapiens
cggcagacggcgacagggcggcggcgccaggcagggcgcaggagagaacagaaagaccaagcagaagagaggacaaagcacc

SEQ ID NO: 239782 - RNA, 84 nt, Homo sapiens
aagcagcaagaggcgcggcaagacacacgacggaagaagaagacccaccacaaagaaccacgcaaagaaaaaagaacggaaaga

SEQ ID NO: 239783 - RNA, 46 nt, Homo sapiens
acgggagaaagcacgggaggagagccaggacccgaaaagccagcaa

SEQ ID NO: 239784 - RNA, 86 nt, Homo sapiens
gggccgagacgcccggggggggacgaaacacacgcgaacccaccagccccaggaacaaggaaaagcaccaggcaaaccaccacaca

SEQ ID NO: 239785 - RNA, 88 nt, Homo sapiens
gcaggcggagcccaagccccagcccccgggcgaggcacaccccggagccaggaggacaggccggacacaaccacaaacgagccacgcc

SEQ ID NO: 239786 - RNA, 68 nt, Homo sapiens
aaggcccaggcaaagaggaaggccaggaacgcagaagaccgcaggggaaaaccaaagaccgacaagac

SEQ ID NO: 239787 - RNA, 73 nt, Homo sapiens
aaaaggagaaaggagagcgaaggccaacagaagaagaggacgaacaaggcgaggggaacaaccgcgaggggag

SEQ ID NO: 239788 - RNA, 68 nt, Homo sapiens
ggaagccgggagcgcagacagcaagggcggagcaccccccggcaacgggggaaagacaaaccggagaa

SEQ ID NO: 239789 - RNA, 78 nt, Homo sapiens
caaggacccagccggagacggcaccggcgagcacgcagacacggcagcgggccggccgaggccaccacaacaaggaca

SEQ ID NO: 239790 - RNA, 99 nt, Homo sapiens
ccgacagaccaggcccaagcgaaaaagcgggaacgcaggacccaaagcgccgcgcggccggacaggggggcggcggaccccggagccccgacaacagga

SEQ ID NO: 239791 - RNA, 84 nt, Homo sapiens
cggggggcccgggcgccgagccgcaggagagacacgcgggccgaccccagagcggcgcggacagcccggaacccgggacccgcc

SEQ ID NO: 239792 - RNA, 69 nt, Homo sapiens
gcggaaggcagcgcccagcagcgcagaaaaggggacaagccacaagagaagagacaacaggaaggacaa

SEQ ID NO: 239793 - RNA, 80 nt, Homo sapiens
ccggggggcaccggacgacacagcgaggccgccaacaccgggcccgggcaccaccaggaccgagaaaccagcaggcgaag

SEQ ID NO: 239794 - RNA, 74 nt, Homo sapiens
acgggccccgcggggcccgagggcaaggagcagagggacagggcgagccaagaggaggcccccagcacggggac

SEQ ID NO: 239795 - RNA, 80 nt, Homo sapiens
cagcagccaaagcccacagccggggaggcgagagaaacccagccgaagcaaaaagacagagcagcagcaaccgggaagca

SEQ ID NO: 239796 - RNA, 74 nt, Homo sapiens
cagcccagagggaaagcacaccaccccagccaggaaacacaaagaagacaccagaagggccagcaccacgacaa

SEQ ID NO: 239797 - RNA, 76 nt, Homo sapiens
cagcgaaaggacacgggagaaagggagccgagcgagaccacgcaccacgggcgggggaaagcaggccaccccgcca

SEQ ID NO: 239798 - RNA, 76 nt, Homo sapiens
cagacgcagggcgcccccgggcgcccgccaagccgggcccacggagacaaggagcagcggcacgggacaccgcgcc

SEQ ID NO: 239799 - RNA, 80 nt, Homo sapiens
gccaaacggcacggaaaaacacaaggaagggaaaggcaccaagaagagaaccgggaagaggcaaacaaacgaccgagccc

SEQ ID NO: 239800 - RNA, 55 nt, Homo sapiens
gaccagcagcccgaggcaccgacgagaggggcaaggacaaagaagcgccgggaaa

SEQ ID NO: 239801 - RNA, 79 nt, Homo sapiens
gagacggagacgagaccgcgccggcacaccccggaagcgggccaagggcgcacccccgcggcgagcagaacacacgaca

SEQ ID NO: 239802 - RNA, 87 nt, Homo sapiens
gaagcagcccacgaaaggcagccgcggacgccgcgccagcgacaaacaacaggaggcaaagggaccccaagaaaccaaagggcaaga

SEQ ID NO: 239803 - RNA, 72 nt, Homo sapiens
gccggaaagcaagcagcaaaaggcggggcgcgcgggacgcggcgcccccggagaagggaaaaaacagcagac

SEQ ID NO: 239804 - RNA, 40 nt, Homo sapiens
ggaccgagcagcagcagagccagccagcaggcaacaggcc

SEQ ID NO: 239805 - RNA, 72 nt, Homo sapiens
gcgccgcccaggccccgcagggaagaaagcacgggaaaaggccgggcccacaggggagagcccagaaaaggc

SEQ ID NO: 239806 - RNA, 70 nt, Homo sapiens
gcaagggacccggccagcgacgcaccgagaaaggaaggaaaaccgacgagccccaaggcccagaagaaaa

SEQ ID NO: 239807 - RNA, 48 nt, Homo sapiens
gacaaagagccaccgcgcaaagccgcaggagggaagcgcacggaaacc

SEQ ID NO: 239808 - RNA, 74 nt, Homo sapiens
gaccagaacggccagagccgcacaaccacaggggcccgacaagcacggggcaccgggcccagaggagcagcccg

SEQ ID NO: 239809 - RNA, 76 nt, Homo sapiens
cgaaggagccagcgccccgaagaaggcggaagcgggcgcgccaagaagcaccacgagaagaggagaggggaaggga

SEQ ID NO: 239810 - RNA, 70 nt, Homo sapiens
cgcgcacgagggcccccccagcggccccggggcgcgggcagccacgcccgggcaccgccgaccgaaaccg

SEQ ID NO: 239811 - RNA, 86 nt, Homo sapiens
ccgagggcggcagcgcccaggccgccccgcccaacccccccccaggcgaagcccaaggagccgcccgcagagcccggaacagccag

SEQ ID NO: 239812 - RNA, 83 nt, Homo sapiens
ccaggagcaacgggccccaggagaaccaggaacagggacccgggacaaggaaaaaaggacccccccgcggcggcgaggcccga

SEQ ID NO: 239813 - RNA, 77 nt, Homo sapiens
agaggccacccgcccacgagcggaagaaccagcagaagagaaagacacccccaaacgaaacagaagaagagcaagcc

SEQ ID NO: 239814 - RNA, 106 nt, Homo sapiens
ggaacaggaagcacccaggcgaccaccgaagggacccagggcgagagccccacaagaagaccaggagcacccagccacgacaccaaacagcagagaaacaagagcc

SEQ ID NO: 239815 - RNA, 78 nt, Homo sapiens
gccgacaccgggccccacccacagaagcgagagccagccgcagagccaagccgagccagcagcgcagccagagggcgg

SEQ ID NO: 239816 - RNA, 68 nt, Homo sapiens
ggagaaggagcccacaacaaccacagaacaaaccaggggagggaaacgagaaaaacgacgccagcggc

SEQ ID NO: 239817 - RNA, 75 nt, Homo sapiens
cggcgcggcggcggcccgccccgcggcccagcacccgagggacccgaggagcccaccaagccgaccgcaggcaag

SEQ ID NO: 239818 - RNA, 49 nt, Homo sapiens
ggcgacgcggaccgcggacagcgaacccggaggcaaaagacgcgggcaa

SEQ ID NO: 239819 - RNA, 82 nt, Homo sapiens
aacgaggccagagaacacgccacccccacccccacaggcacccgcgggaaggacaaggagaccgagccgggcaggggagcgg

SEQ ID NO: 239820 - RNA, 112 nt, Homo sapiens
ccaccgccccagccagaagggcacgccagcggcgcgagaggaccaccggggcggcccggcggagacgcacccccagacgccgacccagaaagccagggacaccaaaccccga

SEQ ID NO: 239821 - RNA, 60 nt, Homo sapiens
ccggaagcccaaggacccagggcaagggaggagagagcgaggccacccagaaggccagcc

SEQ ID NO: 239822 - RNA, 79 nt, Homo sapiens
gggacaaccacaacagaaagcgacaacagccaagagggcgcccagagacaacgagagaacgccaccccaacccggacgc

SEQ ID NO: 239823 - RNA, 77 nt, Homo sapiens
ccagaacaaccgggcgccgacgagacggccggcacagccacaccgagaagaccggcccaagaaccccaccgcccgaa

SEQ ID NO: 239824 - RNA, 82 nt, Homo sapiens
gggcggcgaccgcagggacggcagacccgagcaagacgccaggaccggaagcagagaaagccaaccgaggcaaaagaaacaa

SEQ ID NO: 239825 - RNA, 83 nt, Homo sapiens
ggcgcacgggaggggaacgggccgaacgcagggcaccgccgaccgaaaccgcaaacacacgacagaggcaaggcaaacacgaa

SEQ ID NO: 239826 - RNA, 65 nt, Homo sapiens
cgaagcgggcgcgcgcacggcaggacggagggcgaagcgagaaacaaggcaggaaaacacacaaa

SEQ ID NO: 239827 - RNA, 58 nt, Homo sapiens
gcaggaggagaaaggaaacagaggagagaacacggcacagaaaacgaacgagaaacga

SEQ ID NO: 239828 - RNA, 80 nt, Homo sapiens
cgcagcccacacgaaggcgggaggaaacccaccagagaaggcgcggccacccaggacccgggggaggcagcgaagaaaac

SEQ ID NO: 239829 - RNA, 72 nt, Homo sapiens
gaagcccgccagaaccgaggggcccccaggaccaacccgaggcagaaaggagcagaagacaaaacaggcaga

SEQ ID NO: 239830 - RNA, 58 nt, Homo sapiens
ggggcgaacacgccgcggcccgcggggccagaacgaagcacaacaggcagcgggaaaa

SEQ ID NO: 239831 - RNA, 63 nt, Homo sapiens
cggcacacgcagcagaagcccggaaacccaagggggaggaaccacccacgaaaccggcagggg

SEQ ID NO: 239832 - RNA, 54 nt, Homo sapiens
caggacgcacagcccaagaagaaggggcacacaacaaaacaagggaggaggcgg

SEQ ID NO: 239833 - RNA, 72 nt, Homo sapiens
cccccacgcccgccggccccaggagcgggcagcacacacgaccccaggggacggccacggcggggcggggga

SEQ ID NO: 239834 - RNA, 79 nt, Homo sapiens
gcagccgccgagggcgccgccaggagcagcgagagccagaccgggagacgcagcagccgccaccagacccgcaccgaga

SEQ ID NO: 239835 - RNA, 71 nt, Homo sapiens
ccagaggggaggggaggagaggacacgggagagccgaaccagaagagaaagaagcgggcccaagacacgga

SEQ ID NO: 239836 - RNA, 78 nt, Homo sapiens
cagaccaagcagggggggaagaaaaagagaagcgcagcgaaaagaagagcaccgaggaacggcagcaccccacgcacg

SEQ ID NO: 239837 - RNA, 56 nt, Homo sapiens
ggagaaagccccggcagagaaaaccgaaggagcaagagcggcggccacaaaacccc

SEQ ID NO: 239838 - RNA, 84 nt, Homo sapiens
gccagaaggaagaggcggacggaggagcaggcgagaagagaaggcaagaagacgggaagcgcgggccgaaggaaggcaagacaa

SEQ ID NO: 239839 - RNA, 76 nt, Homo sapiens
agagccacaaccaaaagaagcacaccggccacccccaaccaggaccaaagacgaccaccaaagccagcccccagaa

SEQ ID NO: 239840 - RNA, 38 nt, Homo sapiens
gacggggaacgccccggccacgggacaccccagacaga

SEQ ID NO: 239841 - RNA, 79 nt, Homo sapiens
gagaagaaaaagaagagagagacacggacaaggacaaaaacagcccgagaaagagagaccacagggaccagcagcagaa

SEQ ID NO: 239842 - RNA, 78 nt, Homo sapiens
acaaagaccgcaggcccacgacaccagccgcccggcagcagagaaccccccgcaggccgggaaggggaagccggcaca

SEQ ID NO: 239843 - RNA, 63 nt, Homo sapiens
gcgagccgcacaagggaagcaaaccggcacgagccaggcaccagaaccagaacaccaccagga

SEQ ID NO: 239844 - RNA, 61 nt, Homo sapiens
cgggaagcggcggggcaggccagcgaccggccggagcccaggccccggagccgcagaacca

SEQ ID NO: 239845 - RNA, 41 nt, Homo sapiens
cgaccccacccgcgccgcgacccgagacagggcagggcagc

SEQ ID NO: 239846 - RNA, 76 nt, Homo sapiens
aggcccgagcgagggacaagacccgacccagccgaccgcggcccggcacgcgagaaggggagggggagaaagaaga

SEQ ID NO: 239847 - RNA, 79 nt, Homo sapiens
ccccccagccacggaaacggagaggaccgcacacaagagagacgaacagggacccaaaccccgagacccaagcagaccg

SEQ ID NO: 239848 - RNA, 70 nt, Homo sapiens
gaagaaggacgaggaagcaggacagacacaaggaaggcaaacagggggcaccgacccgcacgcaagaacc

SEQ ID NO: 239849 - RNA, 85 nt, Homo sapiens
cggagacgccgaaggaccggaggaggaccacgccgcaccccacaaggaccgaaggagaagaaggagaaggggaggagaaggcaag

SEQ ID NO: 239850 - RNA, 75 nt, Homo sapiens
aagcccacagaccagaggcacccaccacgcagacccaagagaaacagcagaggggcaaaagcagaccggaaaacc

SEQ ID NO: 239851 - RNA, 82 nt, Homo sapiens
acgggcggcggcaaggccagcgaaggacccgcagggccccgggccagaaagcaccgggaggaaagagagccacacgaagaac

SEQ ID NO: 239852 - RNA, 71 nt, Homo sapiens
accagacgcggcagcaacagcgagacccggggcgaggacccccgagccagcaaccccaagcgcccacccaa

SEQ ID NO: 239853 - RNA, 83 nt, Homo sapiens
agaaaaagaagaagcaacgacaaaccacaccgggccgcccgccgggccgggagcccgaggccagcccggcgccgcaccgcccg

SEQ ID NO: 239854 - RNA, 65 nt, Homo sapiens
gcgacacaaacaaaaggaaaacgcacggcaacccacgaagcccagccggagaagcaagccaacca

SEQ ID NO: 239855 - RNA, 70 nt, Homo sapiens
caagaacaaccgcggacacggagaggaaggacaaggccgacgcgcacgaacacgggggcaaagacaggga

SEQ ID NO: 239856 - RNA, 79 nt, Homo sapiens
caaggacagcgcgaggccgcgcagcccagcgcagccaaggaaagcagcagcagagcaacacccaccaggggacacacga

SEQ ID NO: 239857 - RNA, 37 nt, Homo sapiens
gggagccagaaagcaaaagagaggcgcggggccgaga

SEQ ID NO: 239858 - RNA, 34 nt, Homo sapiens
aagcggaaggccgagggccccaaggcggcagccc

SEQ ID NO: 239859 - RNA, 57 nt, Homo sapiens
cgccgcccccccagacaagaggacaccgcggaggaagggacaagagaaaaaaagggc

SEQ ID NO: 239860 - RNA, 66 nt, Homo sapiens
gagagggagagaacaaccagcggaaggaaggcaaagaagaaagaaagaaagaagaagagacaagca

SEQ ID NO: 239861 - RNA, 73 nt, Homo sapiens
agcagcagaacaaaaaacaccccaggagcagacaaaaagcggaggaggaacgaagagaaaagacgacaggaaa

SEQ ID NO: 239862 - RNA, 83 nt, Homo sapiens
ggacagcggcccaacgccgccaaagaaaggcggcacccaccccccgagcccgcccgccggccccagcccccaccagcagcccc

SEQ ID NO: 239863 - RNA, 66 nt, Homo sapiens
aaccacgcacagaggagaaaaagaacaaaccagggaggcaggcaggcccgcccgcaagcaagagag

SEQ ID NO: 239864 - RNA, 94 nt, Homo sapiens
ggcaaccgcgcagggaggccgaagggccccgggacccgccgcgagggacccggggaacagggcgagacgaacaacgcgcgcaggagaccaccaa

SEQ ID NO: 239865 - RNA, 81 nt, Homo sapiens
cagcccagaaggacagagcagccccacgccagccaaaaagcaaaggcgagcaacacaacagcagagccacaggcaaccaaa

SEQ ID NO: 239866 - RNA, 91 nt, Homo sapiens
gggagagccgggccggcggacgcggcgccacgcagcaggcaaaagcagaccggaaaacccaccggcaagaccacacccgaggggagcccag

SEQ ID NO: 239867 - RNA, 82 nt, Homo sapiens
gagaacgaacaccggaccgccagaaaggcagacccggcaccacagggaaaacggggcaagcccagaaacaccccaccaccac

SEQ ID NO: 239868 - RNA, 66 nt, Homo sapiens
cgggcagaagcgaagcgggacagaacagccaccaaaacagaaggcaaccgcacacaaggaggcccc

SEQ ID NO: 239869 - RNA, 55 nt, Homo sapiens
cgccggcggacgcacccggacgcaaagcgcacggaagcgcaagccccggggcaga

SEQ ID NO: 239870 - RNA, 71 nt, Homo sapiens
caagaaaggaaaaggaacaccaacaaccagcggccgaaccgaagcacaacaagccgcacaccaggggaggc

SEQ ID NO: 239871 - RNA, 82 nt, Homo sapiens
gccccagaggaagcggagagggaggggcgcgacccggggaaaccgagggagggggcaagcaccacgccggaacgggccacac

SEQ ID NO: 239872 - RNA, 82 nt, Homo sapiens
cagcggccaacagcaccacagcaacccggacagcgccccgcccacccggaccgccccaaagacccagggaggaccgagcagc

SEQ ID NO: 239873 - RNA, 76 nt, Homo sapiens
cggcccaaacgaacccagcagcagagaccaacaggccaccgaggccgacgcccgggaacaaccccaaccgggcgcg

SEQ ID NO: 239874 - RNA, 76 nt, Homo sapiens
ccaggaaccagcagagaaacggacaagcagaccggaagaccgacggaagaccacaccccgagggagcccaggacac

SEQ ID NO: 239875 - RNA, 72 nt, Homo sapiens
ccaacgagaaaacaaacaagcggccacccgaaagggaccagacaggcaaaacaccagagaaaaaccaagccg

SEQ ID NO: 239876 - RNA, 61 nt, Homo sapiens
ggaacaaacgagggcccgggaggaccgacgcagccagcacaagcccgggggaaaggcagcg

SEQ ID NO: 239877 - RNA, 41 nt, Homo sapiens
cgcaacagggccgcacgcaaggccgcagccaagccggaaca

SEQ ID NO: 239878 - RNA, 94 nt, Homo sapiens
acggggggagagaacccaaccagggggaaacacagaacgcagggagccagcgaccaggacgggaagacaaccagccagaggccggaggagagag

SEQ ID NO: 239879 - RNA, 76 nt, Homo sapiens
cacaagaagagggcggagcggagacgggagaagaaaagacccggacacaagagggcaagaaaggcgcgacgggccg

SEQ ID NO: 239880 - RNA, 70 nt, Homo sapiens
accgacgcggaaaaaaagacccaggaggagcaacacgggaccgagaggagccacacaggccggaagccac

SEQ ID NO: 239881 - RNA, 83 nt, Homo sapiens
gcgcggcggccgggccccgagacggggacgcggccaagggaggccgccagccgaggcgaggagcgggggagcggcgccaagga

SEQ ID NO: 239882 - RNA, 78 nt, Homo sapiens
gcgcgcccgaggcgaggaggagcgcggcggaccccaaaccagacagaggcggccgacgaacagaccccccgaaacccg

SEQ ID NO: 239883 - RNA, 71 nt, Homo sapiens
acaaaacaagcccccaggaaccacgaaagcggccagggaaccagcgaacacaaaacccaaaccagaagaac

SEQ ID NO: 239884 - RNA, 80 nt, Homo sapiens
aaggcgaggcaccggaacagacgcaggaagcacaaggcaacaccgaagcaccaaaaaaaccggagaaagagaacaaagaa

SEQ ID NO: 239885 - RNA, 79 nt, Homo sapiens
cgccccgggcggggcccaccgcagcccaagggcaccgggggggacgaacagcggggacgccccagcagaccgcccagga

SEQ ID NO: 239886 - RNA, 69 nt, Homo sapiens
ggaagaagacaccggggacagacagggaacccaaggaccgcaaagaaaacccagagaacaccacccgaa

SEQ ID NO: 239887 - RNA, 85 nt, Homo sapiens
gcgcaacaaacgcgagacgcacagcccggccggggaggggcggccccacggcgagcagcagagaggaggaagaagagaaaggaag

SEQ ID NO: 239888 - RNA, 118 nt, Homo sapiens
cagacaccacacaagaaaaaagagggacggcaagggggaaagaacaccgaccagagaagcgccggaaagaaagacacgcagaggagaggagaaaggagacgcagaacgggcagagacc

SEQ ID NO: 239889 - RNA, 83 nt, Homo sapiens
acgacccaggcccagaccgaccagcccaagaaacaccaccaacaaacggggcaacacccccacaaagagcaagccagccggac

SEQ ID NO: 239890 - RNA, 71 nt, Homo sapiens
cgggccggcgagcgcagcgcgaccgggaggcccaggccagcgccccagcccgcccaaaggggaaacccaca

SEQ ID NO: 239891 - RNA, 79 nt, Homo sapiens
cagcaggcaacgcgggacaaaacaaggacccagcaaacggagaccaacggagcggcgacaagccacacaccaaacccag

SEQ ID NO: 239892 - RNA, 81 nt, Homo sapiens
cccccgcgccgaacggggcaacagccgcagaccggaccagggagcgcgcgcaggcaacaccccaccagaccacccagcaag

SEQ ID NO: 239893 - RNA, 78 nt, Homo sapiens
gcgggaagagaccagcgaagaaggcccgaggaaaggaggcgacacccgaagccccgaccgccacagcagagagagacc

SEQ ID NO: 239894 - RNA, 71 nt, Homo sapiens
aaccaagaaacagaacagcccaagcagaaaaagcggggacccaaccgcgccacaaagcgaacagccgaagg

SEQ ID NO: 239895 - RNA, 82 nt, Homo sapiens
caccgccggccgcccccgccggcaaggggaagaagaagcgagcggcgccgccgcaggggggggcaagaccagagaccacaga

SEQ ID NO: 239896 - RNA, 72 nt, Homo sapiens
agggcgaagcacgccaccagccacggaaagcagagcaaaccagcccaccgcacccagggaaaaaacagcagc

SEQ ID NO: 239897 - RNA, 77 nt, Homo sapiens
agggccaccccggcgaggagccggcgcagcgacacccccaagcacgacaaccgacccgacaaaggaggccgaagaca

SEQ ID NO: 239898 - RNA, 72 nt, Homo sapiens
cgccaaacgagaagaaggaaggaaaaaacacacaggaagaaaaaccggagcccgacacacagcaagaaccaa

SEQ ID NO: 239899 - RNA, 49 nt, Homo sapiens
gcacgggaggagagggggcgaggaagagacaggcgggggagaagaagca

SEQ ID NO: 239900 - RNA, 82 nt, Homo sapiens
cacgggacgcgacgcgccccgcccccccgccggcccccccacggaagggacaagcagaccggaagaccgacggaagaccaca

SEQ ID NO: 239901 - RNA, 36 nt, Homo sapiens
ccgacagcccgccgccccgcagcacaaccccgcgcg

SEQ ID NO: 239902 - RNA, 78 nt, Homo sapiens
ccgaaagagaaaaagcggaaggccacacggaaccaggccaagcggaaacaggaaggaacaccaggaggcccagaagga

SEQ ID NO: 239903 - RNA, 91 nt, Homo sapiens
gagagggcgccgcagacccggcagggcacggaccgccaggccgaggcaaggcagcggaaagcacagccaggccacagcccagcagcgggca

SEQ ID NO: 239904 - RNA, 73 nt, Homo sapiens
cggccggcgggcgggggccccgcgccgcggccgagcagcggaagacgaccccgacgcaggccaggagccgcgg

SEQ ID NO: 239905 - RNA, 72 nt, Homo sapiens
cagcaggaagggagagccacccaagagacaagcaggacacccgcaggagcaaacagccaagggacaaccaac

SEQ ID NO: 239906 - RNA, 90 nt, Homo sapiens
caaagccagccgccccagccagccgcaacccagccagccaccgccaccgcgaccacacggggggaacacgaagagccagacccggacccc

SEQ ID NO: 239907 - RNA, 77 nt, Homo sapiens
gcgggcggaagacaggccacccagcggggagcacggcgagcagccaggccaggagaggccccgagccccggccccaa

SEQ ID NO: 239908 - RNA, 62 nt, Homo sapiens
ccggcaggaacgacagcacaggaagcccaagaagcaagagacgaaggccgagcggccccgag

SEQ ID NO: 239909 - RNA, 70 nt, Homo sapiens
caggaaggagccggggcggggcaggagaggcggaggacaggagggagcgggccaacacaaacacacaagg

SEQ ID NO: 239910 - RNA, 65 nt, Homo sapiens
gacagcagaggaaacgagggacaacacagacccaccagcagaggggggcagcgcagcaggcgggc

SEQ ID NO: 239911 - RNA, 74 nt, Homo sapiens
ccaaccgcgacagaggcaacggaagaacaggagcaccaaggagacagacgagccggcgcagaaaagaaggagcg

SEQ ID NO: 239912 - RNA, 70 nt, Homo sapiens
caaccgccacggaaggagcgcgggcccaggcggaggcggaggcaaggcagaccggccaacgcaaccacac

SEQ ID NO: 239913 - RNA, 54 nt, Homo sapiens
cccaccgacgccgacaggcagagccgcaacccggccaagcaaaccgcagagcgg

SEQ ID NO: 239914 - RNA, 77 nt, Homo sapiens
gcgagcgagggggggcgcgccggaaaccggagcgcgcagcagcagccgcgaacgcggccgggaggcagagcgaggca

SEQ ID NO: 239915 - RNA, 35 nt, Homo sapiens
acaagagccaaccagggggcggagaacggaaaagc

SEQ ID NO: 239916 - RNA, 77 nt, Homo sapiens
aggagacaaggaccgaaacagaaacggaacaccaagaacccaggagaaacgagagggacagcaaggaagacgccaga

SEQ ID NO: 239917 - RNA, 73 nt, Homo sapiens
ggaccccaaaagagccaagcccagagaccgccagggagaaaagacgaggaagcccaaaaaccgcaagaaaggc

SEQ ID NO: 239918 - RNA, 65 nt, Homo sapiens
gacgacgcgcgggccgcgagcggggcgacccgaggccccgagccccggccccaaagacccaaaac

SEQ ID NO: 239919 - RNA, 70 nt, Homo sapiens
aaacaagaaagcagaaccagcagcaaaaggggcaaggggaaaagacagccacggggaaaaggaaggccgg

SEQ ID NO: 239920 - RNA, 61 nt, Homo sapiens
ccccagccgccgcccacgcagcagggacagcagcaggaggcgaaagcgcgccaagagccgg

SEQ ID NO: 239921 - RNA, 66 nt, Homo sapiens
aagcaacagaggcccgcaccaccacaaaccggccaaggcacaaaaggagggacccacccgagaagg

SEQ ID NO: 239922 - RNA, 78 nt, Homo sapiens
aaccggcgaacggcgcagggagaagaagagaaggcacaaagacggaacgaacaaagcaaagaagagagccagaacagg

SEQ ID NO: 239923 - RNA, 74 nt, Homo sapiens
gcaggcgcaggccacagccgaaaccagccagcaagcaaaagcagaccggaaaacccaccggcaagaccacaccc

SEQ ID NO: 239924 - RNA, 76 nt, Homo sapiens
aaggccccccgggacaagccaggcaccccacacagacacaagaccaaaccggaccacccaaaaagccgaagacccc

SEQ ID NO: 239925 - RNA, 91 nt, Homo sapiens
agacgcagccgagacaccagcccgaaacaccaccaaggaagggaaaaggccgaggcacagcgggaagaccgcaaagacgacccgagacagg

SEQ ID NO: 239926 - RNA, 69 nt, Homo sapiens
aacaggaacaaagccagacggcaccaccggcggcacagaaggaaaacaaagcagcacagaggcaccgac

SEQ ID NO: 239927 - RNA, 80 nt, Homo sapiens
agaagaggcgacaaagaaggccagaacggcggaaaagaaggacggggggaagagcaagagggggcccagaaggaagaagg

SEQ ID NO: 239928 - RNA, 75 nt, Homo sapiens
cgaccaggagcagaggggggaccgaagcacagacagcacccggcaaaggccgccgaggccaaggggcaaaggccg

SEQ ID NO: 239929 - RNA, 77 nt, Homo sapiens
caagcacgccccaccagcagcgccagaggcaccggccgaggcaaagcaccgcccccgccccgcggcagcccggagcg

SEQ ID NO: 239930 - RNA, 88 nt, Homo sapiens
caacgcaaccacagaaacaagggacaggcaacccagaggaagagcaaagaaaagagaagagcagcaagcccaggccagcggcgaagca

SEQ ID NO: 239931 - RNA, 61 nt, Homo sapiens
ggaaagacaaaacgagcacgcaagccaagcgaaagacagaggcccagccgaaagaggggag

SEQ ID NO: 239932 - RNA, 84 nt, Homo sapiens
ggcggcacgccggcggggaccgcgggaaggcgaggacgaggacgaggacgcaaggaaaaagcaacggacacagaaccaaaggaa

SEQ ID NO: 239933 - RNA, 65 nt, Homo sapiens
aaagggcgacggcacacagagagaccgaaccaaaccgaggcgcggagcacacagaaacgcaccag

SEQ ID NO: 239934 - RNA, 54 nt, Homo sapiens
agcacagcacccacaaagcaacgccaacgaaagaaggcgccgcaaggaaacaga

SEQ ID NO: 239935 - RNA, 65 nt, Homo sapiens
ggaagaccgagcaaagagcgaaaccagagcaagcagggcaaaagggcccggaagcggcaccgaga

SEQ ID NO: 239936 - RNA, 81 nt, Homo sapiens
gaggcggagcgcccgggccacgaggacgcaccaggaggccggcacgaagaccgcccacagaaggccgcgccccccagagag

SEQ ID NO: 239937 - RNA, 63 nt, Homo sapiens
cagaccaagggcacaaggaggacagaacaaggaaagaaaccaaaaaagaagccaacaaacaga

SEQ ID NO: 239938 - RNA, 75 nt, Homo sapiens
gagaagccgccgacggaaaggcaaaaggacccgaagacaaaaccacccacgaaagcgaaaagacccaaaacaagg

SEQ ID NO: 239939 - RNA, 85 nt, Homo sapiens
ggggggcgacgccgagggcgggggagagcgcgccgcgccccggaccgggccgcgcacgccgcccagaggaggacggccaaccccc

SEQ ID NO: 239940 - RNA, 78 nt, Homo sapiens
caacagcggaggacacaggcaccagacgggacagaaaaccagaggaggcagcgacggaagcccgcgcccaagacccca

SEQ ID NO: 239941 - RNA, 68 nt, Homo sapiens
caaagcgagagaaccaggacgcaaaaaagaaagaagaggggcagaagcaaggacagagacggagaagg

SEQ ID NO: 239942 - RNA, 71 nt, Homo sapiens
cacaaagccacagcgaccaagggcccgagggcaggacagcaggcaccggcgaagcacagagaggcgcgagg

SEQ ID NO: 239943 - RNA, 59 nt, Homo sapiens
caacaagcaagcagcagcacgcgaaagaggaaccagacagcaccaggggccagagcagc

SEQ ID NO: 239944 - RNA, 82 nt, Homo sapiens
cggagggcggcccgaaagcgccgcggcgcgggcagccgggaggagacaacaacaagacgaacaggaggcagaaccaacagaa

SEQ ID NO: 239945 - RNA, 72 nt, Homo sapiens
acagaaggaggaaaggagaaggcaaaggccagccgaacaaaaggccgaagggagcgcagcacaccggcaaca

SEQ ID NO: 239946 - RNA, 81 nt, Homo sapiens
cgaagaaggggcaagcgcccgcacacaacaacgagaaggagcacacccgcaccaccggaccggcaggcccccaacccaccg

SEQ ID NO: 239947 - RNA, 86 nt, Homo sapiens
gcgacagcgcggggagagccgggcaggacggcgggccgaggagcccggggagggacccggagcccagagacaccaagggagaaagc

SEQ ID NO: 239948 - RNA, 82 nt, Homo sapiens
cagcaggggaaccacagcaagcaggcacggagaaggcagccacaaggccaaggacacccagcggcgcaaaggagccgagggg

SEQ ID NO: 239949 - RNA, 74 nt, Homo sapiens
cgagccaagcaggaaggcccagcaaagagaagaaggagagaaacaaaccgggcaaggcaggcccggcaaacgga

SEQ ID NO: 239950 - RNA, 105 nt, Homo sapiens
gacgaacaccggccaagcgccacgggcagaagcagaacaccgagaacaaagggccaaaaagcagaaaaacaaaccagcccaagaagcgacaaagcccgcgaccaa

SEQ ID NO: 239951 - RNA, 61 nt, Homo sapiens
gacaaacaggaaaggacaagaaaacggacacacacagcaaaaaaaaacgggaaccaaaaac

SEQ ID NO: 239952 - RNA, 76 nt, Homo sapiens
cacgcacccagcgggcagccagccaggcagcaaacaacagcagaggagccaggaagagacaagcaacgaggaaaag

SEQ ID NO: 239953 - RNA, 65 nt, Homo sapiens
aacccggcgcaagggaccccagggcagggaccaacaaaagaaggaccaaaaacccggagaaaggg

SEQ ID NO: 239954 - RNA, 79 nt, Homo sapiens
gcagaagggacggagcccagccgaggaccgcgaagaggaacaaggcaaccccgcacaaacccagcgaacaacggaggag

SEQ ID NO: 239955 - RNA, 78 nt, Homo sapiens
cgacagaccagaagccgacgcgagaggaagacacccgaccgacaaaaggaccgccacggcggaacgaccgaccgcgaa

SEQ ID NO: 239956 - RNA, 80 nt, Homo sapiens
cgcggaaccggcaaccccccgaggaagaaggaggaggcgccacaagagaaaggagaagggacaaaaagcccgaagaagag

SEQ ID NO: 239957 - RNA, 71 nt, Homo sapiens
gccccaaacgagagggcggaggacaagccgcggagcagggggagggaaccaaaaccagaccaggagacccg

SEQ ID NO: 239958 - RNA, 70 nt, Homo sapiens
caaaaacagggaaagggccagcacaggagaggacaggacagcagagcaaaggccaagcaaaggaggacca

SEQ ID NO: 239959 - RNA, 85 nt, Homo sapiens
cagaaagcaggcgaacccgcggcgcaaaacgggaagcagagccccgggccgggaaggggaaacggccacgcaggaaccacaagga

SEQ ID NO: 239960 - RNA, 76 nt, Homo sapiens
gaaggagaggcggcccgggcccgggcccagcaaaggcagcgagaccggccgcagcaagccagccacaaaagacaaa

SEQ ID NO: 239961 - RNA, 81 nt, Homo sapiens
agccgagcagaaagaacacacaggaaacaaggacaagcccgcggccagcaaccaggacaagccgagccaaaagcgagacca

SEQ ID NO: 239962 - RNA, 81 nt, Homo sapiens
ggaccagcaggacaacagacagccggacaggaccaccagggccaggggccggaggcagcggcaggcacggcggcgccagag

SEQ ID NO: 239963 - RNA, 75 nt, Homo sapiens
caagaagccgagcaacccccaggagaagagcccaagcagcgccagacaaagagcaagggagcaagacagaaaaga

SEQ ID NO: 239964 - RNA, 76 nt, Homo sapiens
gaacgaagggaagcgcagaaaggaaaacaaaggagcacaggaagcagcccgacggccaggaggcgaagagacgagg

SEQ ID NO: 239965 - RNA, 74 nt, Homo sapiens
gcgcaggccggggcgagcggcgggcccgcgggccaggccgggagacaaacccggggcaaaaagggggaacgcag

SEQ ID NO: 239966 - RNA, 76 nt, Homo sapiens
gaaaagacccaaagagacccagaaagaaaaaaggcaggaaacaggaagaacagaagcaaggagaaaaagcgaaaaa

SEQ ID NO: 239967 - RNA, 80 nt, Homo sapiens
gaacagacagccacgcagacggaaacaaggcaacagaaagagcaacagcagggcaacaggaaggcaaacagggggcaccg

SEQ ID NO: 239968 - RNA, 72 nt, Homo sapiens
aaaggagaggacagaaagcgcaaaggcccaaagcccagccaaggacccgaaaaacgagccacaccaaaaggg

SEQ ID NO: 239969 - RNA, 77 nt, Homo sapiens
gcgggggaggggagcccgcgcccgccgcgggagagaggacccccccccccccccaagcacagggcccaggccggagg

SEQ ID NO: 239970 - RNA, 61 nt, Homo sapiens
ccaggaaccgaagggaaacagagagccagaaggaagacaagcggagacgagcgccaaagac

SEQ ID NO: 239971 - RNA, 79 nt, Homo sapiens
gaaaacccacgagaagagccggcagggacaggaagaggggcgacggaccggggcccaggccagccccaccgccaaggcc

SEQ ID NO: 239972 - RNA, 91 nt, Homo sapiens
cggcgccccacccgcccccgcgggcgccgggccaggacgggcgcggggaggcccagcccgccgcagggccaccccgcggcccaccgccgcc

SEQ ID NO: 239973 - RNA, 80 nt, Homo sapiens
acggagacaagaaaacgcagacaggggagagccaccgacccaagagccaccccaaaccaaacaacagcacagcaaacggg

SEQ ID NO: 239974 - RNA, 75 nt, Homo sapiens
acggcgggagaagaagagcgcgagaggacgggacagggcaggaaaggagggcgaaacacaagcaccacccccgga

SEQ ID NO: 239975 - RNA, 38 nt, Homo sapiens
gagaggagccaaacccccagcgcaggacaagcgagcac

SEQ ID NO: 239976 - RNA, 42 nt, Homo sapiens
ccacgaggaaaccagacagccacacaaccagggacagagcca

SEQ ID NO: 239977 - RNA, 77 nt, Homo sapiens
gaacccacagagccggaacagaccagcagacaggaaaggagggcacggagcggggagccccgcgcacacaggacgcg

SEQ ID NO: 239978 - RNA, 81 nt, Homo sapiens
ggagccgccgccggagcgagaacacggggaccaagaaaggcccagggaccaaagcccggacaaggcccgagcaccaggacc

SEQ ID NO: 239979 - RNA, 79 nt, Homo sapiens
gaagacaaaaaacccaagaacccaagagaagagcgggcacggcgggacggaagaaaggaaacagcccggcccagcccac

SEQ ID NO: 239980 - RNA, 72 nt, Homo sapiens
ccgccgaagaagcacgaaagccccacccgccgcagcaagcagaggcaaagaaaaagccagccgaggacggga

SEQ ID NO: 239981 - RNA, 80 nt, Homo sapiens
cgcgggggcaggagggaggacggcccacgagacccaccggaacagacccgccgggacggcaagcgggagagcacgcagca

SEQ ID NO: 239982 - RNA, 78 nt, Homo sapiens
ggggggcgcagcagcccccgcgcgcgcgccgaagcggcggggcggaggaagcgggggacacccacgccaccagaacac

SEQ ID NO: 239983 - RNA, 79 nt, Homo sapiens
cgcagcccggcccaacccggaccggggacgcacggaccaaaaacccgcaacagcccccgcccaacggagccggagcgag

SEQ ID NO: 239984 - RNA, 73 nt, Homo sapiens
gcccggaccagccaagccccaacggcccccgcgccgggcgcagcgagaaacacagcccaaagaaacacacccc

SEQ ID NO: 239985 - RNA, 68 nt, Homo sapiens
aacacggggcgcaaagaagggacaaaggaaaaagaggaggaaaacagcagggacgaacaaaagcgaga

SEQ ID NO: 239986 - RNA, 89 nt, Homo sapiens
aggcgaagcggccgagcaggcgagcgaacgacggagcggaggcagcaagccggcgccacccgggggaggagaaggccgaacggggaccg

SEQ ID NO: 239987 - RNA, 73 nt, Homo sapiens
gaacagagcacaaccagaaccagacgcagcggggaaaggacacagcgccacccgcaacccgccccgcaaccgc

SEQ ID NO: 239988 - RNA, 48 nt, Homo sapiens
gaaggaccaagaaccagcgggccaaggaaagcggagggagccccagag

SEQ ID NO: 239989 - RNA, 50 nt, Homo sapiens
cgcgcgccgccggcgaaggaggaggcggccggaaaacgaggaacacggga

SEQ ID NO: 239990 - RNA, 74 nt, Homo sapiens
gaaggccaaaggcgcgcaaggaggaaggccagaccaccacggaaacaaggacgggcgggcagcccgccggccac

SEQ ID NO: 239991 - RNA, 72 nt, Homo sapiens
acaggggccgcgccgcgccgcgcgcgggagcgccagcaagaaccgcacggccaagcccacacagaggaaacc

SEQ ID NO: 239992 - RNA, 80 nt, Homo sapiens
aaaggaggcggaagaaaggagcgcagaccgggggaaggagaggcagcaagaggagaagaaaggaggaaaccacagggaaa

SEQ ID NO: 239993 - RNA, 58 nt, Homo sapiens
ggaccaagaaccaggacagcccagagcaagcacacggaggcccgggagccagaccggg

SEQ ID NO: 239994 - RNA, 60 nt, Homo sapiens
aagcggaaaacaggggcgaggggacaaggagaagaaagagagcccgagggaaaagacagg

SEQ ID NO: 239995 - RNA, 66 nt, Homo sapiens
acgacgaacacggggccacccagagcccgacacggggcagacaaacacagcacccagcaccgccag

SEQ ID NO: 239996 - RNA, 74 nt, Homo sapiens
aggcagagcgggcgcgccacggccacacgcccagcgagcgccccacacaggagaaagaagaaacaaagagggac

SEQ ID NO: 239997 - RNA, 83 nt, Homo sapiens
aagccggacccgccagaggaccaacagggacggagcggagaaaaggaaccggccccggaggagaaggcagagcccccccaggc

SEQ ID NO: 239998 - RNA, 72 nt, Homo sapiens
gaccagagagaccccggagggcagagacaggcaacagacggcaacgaaaggcacaaaaacgcaacacaaaga

SEQ ID NO: 239999 - RNA, 82 nt, Homo sapiens
cagaaacgccagagcggagcccaacgcagccgccagcggggccccgggagacgggcgggagagagcaccaacccgagaacag

SEQ ID NO: 240000 - RNA, 86 nt, Homo sapiens
ccgcccgggccacccccacagccgcaccaaagcgcaggaaagaaacgcggcaagaaagcgacccgagggccaggaacagaagagga

SEQ ID NO: 240001 - RNA, 80 nt, Homo sapiens
gagcagggggacagaacaacccaagagcggcaaaaagcggccacccggggaaccccagcaagaccggcggagagacggag

SEQ ID NO: 240002 - RNA, 80 nt, Homo sapiens
ggggcccggcacgaccgcggggcagcaagagggccccgcgaccaggggcgcaggagaaaaaggcagccccggagacgaaa

SEQ ID NO: 240003 - RNA, 72 nt, Homo sapiens
agaggaggccccccagccacggaaacaagcagcaggacaggacccccacgggacccaaaccaccaaagccaa

SEQ ID NO: 240004 - RNA, 67 nt, Homo sapiens
gcaggcaccacaaaaaggacaggaaaacccccgagacaaacacagacccaaggaacgaccagagaga

SEQ ID NO: 240005 - RNA, 67 nt, Homo sapiens
ggggaccggcgaggagcgaagaacaaacacccgagcgcgaggagaaggcagaggccccacaggaccc

SEQ ID NO: 240006 - RNA, 82 nt, Homo sapiens
caggcgccgcacggaggcgcccggggacggggccgcagggagacaaagaacgcaaacccaagcggcaacacggcggggcacg

SEQ ID NO: 240007 - RNA, 81 nt, Homo sapiens
gcgcgcgcgaggagccgccccaccacacagcaacggacaaagcccgccccccaaagcgaagccaaagcgaaggcaaaggcc

SEQ ID NO: 240008 - RNA, 71 nt, Homo sapiens
ggggcaaacaccacacaagaaagagcaaggcacagcgacaacacgaacggggaagccggggaaaccagcag

SEQ ID NO: 240009 - RNA, 60 nt, Homo sapiens
cgaagacacccacacagaacaagagcggacaggaaggaaagacgagaagggaccgacgga

SEQ ID NO: 240010 - RNA, 76 nt, Homo sapiens
ccccgacaccccccaagagccacgccgagcggcacccaggggcgccacagccccaccagcagccgcaccggagccc

SEQ ID NO: 240011 - RNA, 50 nt, Homo sapiens
agggacagggcgaagcacagaaccagcacggccaagcaacaggcgcacgc

SEQ ID NO: 240012 - RNA, 63 nt, Homo sapiens
gcccgcggcggcccagagccagaacacggggcacagccgagaagggccaggaaaaccaagcgg

SEQ ID NO: 240013 - RNA, 69 nt, Homo sapiens
gacgaacagcgggccgcagccaagcgccgccggaacgaggaaccccagagaggacagaagccaaccagg

SEQ ID NO: 240014 - RNA, 72 nt, Homo sapiens
aaccaacccgcccaggacaagccgcgcggggacccgacgcccgcacgaaggggaccacggaccaagaggacc

SEQ ID NO: 240015 - RNA, 77 nt, Homo sapiens
gaaaaccccaaaacaccggcacagcaccacaaggcaccgccgccaggaaggaaacggcgaggaaagagaggagcccc

SEQ ID NO: 240016 - RNA, 77 nt, Homo sapiens
cagaaaacaagcgcccaccagacaagcaaagaagcaccggagcaaagggacaaagcacgagaggcgaccaagaaggg

SEQ ID NO: 240017 - RNA, 55 nt, Homo sapiens
cccgagaaccgcgccaccagagacgcaaaccagccggcgggcgccacaacggacg

SEQ ID NO: 240018 - RNA, 84 nt, Homo sapiens
cgaggggcgcgaggccccgcccggccaggcccagccgggcccggacaggggaaaccaaaaccagagaagccggaacccaaggcc

SEQ ID NO: 240019 - RNA, 73 nt, Homo sapiens
gccgggaccaacaggggcaagacaagccagaacgagaagcgcaccacagcgaaccggacggcccaccacgacg

SEQ ID NO: 240020 - RNA, 79 nt, Homo sapiens
ccacacccccccggggggggcaccagacccgcgaccgacagcccccagcccccccagccgcagggagcccgggccagag

SEQ ID NO: 240021 - RNA, 69 nt, Homo sapiens
cgagacccccagcaggccggcgcacaaaaaacaacgagaaagagagaaagccagacggagaaggaaagc

SEQ ID NO: 240022 - RNA, 71 nt, Homo sapiens
gggaggcagaggggcaggggggagaagcagaccgcaccaggcgggaccccgaaaaagcccaaacagacagg

SEQ ID NO: 240023 - RNA, 52 nt, Homo sapiens
cgaggaccggcaacagggcggcggggaaaagggcgcggcgagcgcgccagac

SEQ ID NO: 240024 - RNA, 76 nt, Homo sapiens
agaccaaaccggccggcaagagaggaaaaaagccgcaagagaggagaacagaaaacaaacaaagaaaggaaagaag

SEQ ID NO: 240025 - RNA, 79 nt, Homo sapiens
gaaaccgggacaccggagagccaccaggcccggagcaaacagccagacaggcaaccacggcgacaggaacggcccggcc

SEQ ID NO: 240026 - RNA, 69 nt, Homo sapiens
gcacaccagaaggcgaacagaaacgacaaacgagcagaagaccaaagaaacgaaaccagaaacagccgg

SEQ ID NO: 240027 - RNA, 77 nt, Homo sapiens
gcagaagggcgcggcaaacaggcgacccgacacagagggaacgaagggcggagaacggaaaagcaccaggaagcaga

SEQ ID NO: 240028 - RNA, 83 nt, Homo sapiens
aaccagccccagaaacggccagaacggagaaacagggcacaggaaacccagcagcgccggacccgggaagaacgggagccaag

SEQ ID NO: 240029 - RNA, 53 nt, Homo sapiens
ccggcagacaggaccacgaaggagagacaccaggagacagcaaaaacaaagaa

SEQ ID NO: 240030 - RNA, 57 nt, Homo sapiens
aaagcacaagagaaagaaggaagcggcgccgaaaaaaagaggagccgccggcccagg

SEQ ID NO: 240031 - RNA, 77 nt, Homo sapiens
gcagagcaagccgacgagaagcaagaacaggagagcacagagccgggaaagcagaagaagaaaggagcgccacaggc

SEQ ID NO: 240032 - RNA, 72 nt, Homo sapiens
aggaggacgaaccaacggaacgcggaccaggagacaacccggacaaggccacccccgggaagaggcacagac

SEQ ID NO: 240033 - RNA, 76 nt, Homo sapiens
gcggcggaccacccgcgacggcagacagcggaggcgcacagggggaaagcgaagcccaggagaagaggcaagaagc

SEQ ID NO: 240034 - RNA, 54 nt, Homo sapiens
gaaaaccaaaaaccacgggcgggagcaaccgaagagcgcagaaagcccggaaga

SEQ ID NO: 240035 - RNA, 81 nt, Homo sapiens
caacggagaaaacccggaaccgcgacggcggcaggacgcgcccaggagaaaaacagaagggcagccaggggagcagaagcc

SEQ ID NO: 240036 - RNA, 75 nt, Homo sapiens
cccccagagccaccccagcccgccaccgcgcggagccccggacacagaaaacgaggaacacgggagcagcgacag

SEQ ID NO: 240037 - RNA, 54 nt, Homo sapiens
aaggcaaaccagacaaaaaacaacaggacaagaggcaccagaggcacggcacaa

SEQ ID NO: 240038 - RNA, 77 nt, Homo sapiens
gcgggcccgggccaggccgccgccgagccgaggcgacacaccaaagaaaaaacacaccaagcagaaacggagccaag

SEQ ID NO: 240039 - RNA, 72 nt, Homo sapiens
ccagcccagcgcccgcagcccaggagggcgcgcacccgggcgaagcagccaagagacccaagcgccggcgcc

SEQ ID NO: 240040 - RNA, 68 nt, Homo sapiens
aaaacgacgagaaccagaaggaacaagcgggaaacggagccaccaacaagcgggagaaagacagcaag

SEQ ID NO: 240041 - RNA, 81 nt, Homo sapiens
cgaggcagaaagaagccggacaccagaccaacacgaagccgccggacccacccgaacccacaaaacgcaccagagagccgg

SEQ ID NO: 240042 - RNA, 75 nt, Homo sapiens
aaaggagaaaggaaccgacagacgaaggaagaccaaggaagaacaggcaagcgaaaaagggaaaaggagagaaaa

SEQ ID NO: 240043 - RNA, 82 nt, Homo sapiens
ccaccgccagcggaacccggggacacgacgccccaaaccgccaggagaaaaaagagagaagaagaaggaggccgcggccaga

SEQ ID NO: 240044 - RNA, 74 nt, Homo sapiens
caagcaggaccacccaccagccaccaggccacccaaacagagccaggccgagacaaagaagcggacaggcccgg

SEQ ID NO: 240045 - RNA, 73 nt, Homo sapiens
cgcccaggagagaaaggagacccgacgcaacgcggagcgcaaggcgagggacgagaacgagaccgggagaaga

SEQ ID NO: 240046 - RNA, 82 nt, Homo sapiens
acaagcacgagggcgcgccgagacgcccgagggacacaagcagacagggaagggaagcgaccacaaagagaggaagaaggcg

SEQ ID NO: 240047 - RNA, 72 nt, Homo sapiens
acccgggcaaagaagagcaaagaaacgggaaccgggggcggccggacgcaaagggaagagccacgcaacccc

SEQ ID NO: 240048 - RNA, 79 nt, Homo sapiens
gccagggcacgggacccggccgcaggggggccccaacagaaaaggcaccacacgaaccgaggcacaccaaaggcggaag

SEQ ID NO: 240049 - RNA, 62 nt, Homo sapiens
ggcgggggacgaaagagaaacccggagggcgccgggagggaccgggcgcagagcccagagga

SEQ ID NO: 240050 - RNA, 36 nt, Homo sapiens
acgcgccgccaacaccagacgccagaagcagcgaaa

SEQ ID NO: 240051 - RNA, 41 nt, Homo sapiens
gggaggcacaaaggggaacacagaagccagcgagaagaccg

SEQ ID NO: 240052 - RNA, 76 nt, Homo sapiens
acacgcccgggacaagacaccccaggagcccagccacagccaccggacccccagcccgcaccaaccggaaggacag

SEQ ID NO: 240053 - RNA, 75 nt, Homo sapiens
aacgggcacagcagcggaaaaacacagagggcacacggcacagaccaggaagaagaccaaaggacaaaaaagacg

SEQ ID NO: 240054 - RNA, 78 nt, Homo sapiens
gcggaggaaagagaagaaagaaccgaaagagaagaagaaggaggccgcggccagaaacccaagaaaaagcgaaggaac

SEQ ID NO: 240055 - RNA, 70 nt, Homo sapiens
ggcgggccccgagagcagcagcgaaacgaaccggcccagaagacaacagggcaagcaaaaaaggccacag

SEQ ID NO: 240056 - RNA, 77 nt, Homo sapiens
ccgcggcccgcgcaggagaccgagaggccgaagacaagccccggcacaggaggagagaaaccagccgaggcagccga

SEQ ID NO: 240057 - RNA, 81 nt, Homo sapiens
agacgagcagaggcaaagcacaaccacagagagcgggccggccgagcaaggggagcggacaacggaccgggcccagccagc

SEQ ID NO: 240058 - RNA, 75 nt, Homo sapiens
cacagagacaaaaccagaaacccaagggagggcgcacgaaaagagggaagcggccgagcagaagccccacgaagg

SEQ ID NO: 240059 - RNA, 83 nt, Homo sapiens
ccacaaggggacccacccaccacacccaggaggccagcccaccagggcaagggcccgccgccacgagccgaggccagaacaaa

SEQ ID NO: 240060 - RNA, 81 nt, Homo sapiens
aaggaaaaggaggaacgccggcccgagaaagcccgccagcagggacaggagagagggcaagagacgacaagcagagagaac

SEQ ID NO: 240061 - RNA, 48 nt, Homo sapiens
aggaaacagaaaacagccacacaagaaaacgcacgcaaggcgcaaaag

SEQ ID NO: 240062 - RNA, 81 nt, Homo sapiens
ccgggagcccgggcccaagcgccccggggggcagcccgaaccagccacaaagcaaagagccagagcacagagcaccacgaa

SEQ ID NO: 240063 - RNA, 85 nt, Homo sapiens
acacggagacaacgagccgcagagagccggacaaaccagacacgggaggcaagaaaccaggaacgagacaaaagaagcgcacgag

SEQ ID NO: 240064 - RNA, 76 nt, Homo sapiens
cacagaccaaaaagaccagagccaccgaagaaagggacacacggcaaaccacagggcgacaaacgccaagaaggag

SEQ ID NO: 240065 - RNA, 74 nt, Homo sapiens
gaggggcacgcggcaaggccaaagaaaccgccagcagcccccaggaccgcgccgcacgagaagaacaagacggg

SEQ ID NO: 240066 - RNA, 86 nt, Homo sapiens
cagggaccaggcggaggcgcgcgggagccggggcaccacagagagcggagccggacgagcgggagaggacaccacacaaaaaacag

SEQ ID NO: 240067 - RNA, 87 nt, Homo sapiens
gcggaggagaagccggaggaggacaacgacaccaccgcagcgacgagcagggaaaggaggacaaaaggaaaaaaaaaaagggaagac

SEQ ID NO: 240068 - RNA, 78 nt, Homo sapiens
agggagagccggggacgacacacacacggaggaaggagggccccggagcagccacaccaccgaggccccacccagcac

SEQ ID NO: 240069 - RNA, 86 nt, Homo sapiens
agcgaacggagaagagcagacagcagaaagaccgcgaccgcacaagcagccgccagcggaaccaagcggcgcggcacacgagacca

SEQ ID NO: 240070 - RNA, 83 nt, Homo sapiens
cagcaagcaccccagcccaaagggcggcgacggcggcgcgaggaccgaccgggcccgcggacgaagaaggcacccccccgccg

SEQ ID NO: 240071 - RNA, 76 nt, Homo sapiens
cacccaacaaccccaccacggagccggacaagcccgcgggccggcgggcggggacgacgagcccacggcacaacgg

SEQ ID NO: 240072 - RNA, 78 nt, Homo sapiens
gccggccgcagaagcgagaggcggaccaaaaccccagcaaggggcagccggcggccgaggcgcagcggggaggcacga

SEQ ID NO: 240073 - RNA, 78 nt, Homo sapiens
accaacggggagcgcggccagacaggcagacgcggccaggagcggggccgaccacccccagagagagaggcaccggag

SEQ ID NO: 240074 - RNA, 74 nt, Homo sapiens
gcaggaggaccaaacccaaagcaggcaagaggcagagaaagggcccacgccccaggacagagaacagcgggaag

SEQ ID NO: 240075 - RNA, 124 nt, Homo sapiens
accaccggaggaccccagcacacgcagagaccgaggcaccagaaggcaaggacaagcaggcgcgcaacccagcggcagagccgaggacccgagcggcgcccaccgccccgcggagccagagcgc

SEQ ID NO: 240076 - RNA, 73 nt, Homo sapiens
aaaaggcacgagggaacgggaaagaacagagaagcaaacagcggcacaacaagcgggcgcagcagacagacag

SEQ ID NO: 240077 - RNA, 75 nt, Homo sapiens
gagaagccaggcagcaaacacacagagaaacaaagccaccggaacacacccgccgagacggaccggggcagagac

SEQ ID NO: 240078 - RNA, 84 nt, Homo sapiens
gacccagggaccgagaaaggaagacgggggcagcgggggcagagacggggaacagggccacccacacggacgccaacgcggggg

SEQ ID NO: 240079 - RNA, 61 nt, Homo sapiens
gaaaacacagcagcagcagcaaacagccgcccccagcccagggccagaggaagcccgcgga

SEQ ID NO: 240080 - RNA, 84 nt, Homo sapiens
gcacaagcgccagcgaagcacgcccagccaaccagaaacccaggaaagagcacacgggagcgcccccgagagaaccaaacgaag

SEQ ID NO: 240081 - RNA, 72 nt, Homo sapiens
gggacacggacacggagcaggagaagaggaaggcccgagggccacggccaaggccccagcaagacgagaggg

SEQ ID NO: 240082 - RNA, 64 nt, Homo sapiens
aagagggacacgcagagaccaaggcggagcaccgaaaaggccaggagagacagcccaaagagcc

SEQ ID NO: 240083 - RNA, 56 nt, Homo sapiens
caaccgcgaccgcccccccgaaccccgcagcgggccggaacacggagggccgggcc

SEQ ID NO: 240084 - RNA, 37 nt, Homo sapiens
ggcgccagaagaagcgaacgccccccacccggcgccc

SEQ ID NO: 240085 - RNA, 75 nt, Homo sapiens
cgcggccaggggcccgggccacggggcgccggccacgaggggcggaagaccaggcaggacagccacccggaggag

SEQ ID NO: 240086 - RNA, 88 nt, Homo sapiens
gccgcggcgccgccagacagcgagcgaggcggagcacggaagaagacgacacagagaagcaaaccaaggaggaaaccgaccgaggcga

SEQ ID NO: 240087 - RNA, 76 nt, Homo sapiens
ccaaggcgcagcgaccacaggcccacgacaccggagagcgagcagagccaaggagagagagagggcccaccaagcc

SEQ ID NO: 240088 - RNA, 79 nt, Homo sapiens
gggggaggaggggcaggcccggcggccccagggaaaggaccgaggcaggaaagaggccagacgcagggaccggcaccga

SEQ ID NO: 240089 - RNA, 101 nt, Homo sapiens
gagcaagaggccaccgcagacagaaggagcgaaaagcggggccgggcggcaagagcccagagggaccaaggaccagagagcagaagcgccggaacccaagg

SEQ ID NO: 240090 - RNA, 65 nt, Homo sapiens
gcggcggggcgaggcggccgcggggcccgagcgcagacaccaagggaacccaaggggaagcgagc

SEQ ID NO: 240091 - RNA, 74 nt, Homo sapiens
gaagggacaaccggaagcaaaaccgagagagaacacgggcagcgagggaggacccgacaaggcaggggcgccag

SEQ ID NO: 240092 - RNA, 69 nt, Homo sapiens
cccacagaaggcagaggcagaaccacagcccagggaagagaacggaccgcagcagcaaacagaaggccg

SEQ ID NO: 240093 - RNA, 85 nt, Homo sapiens
gccgcaggaggccggcgaggagcgccgcgcccgcccgaaaccaagggagggaaccgggaacggcgcggcaaaggagagagaaagg

SEQ ID NO: 240094 - RNA, 73 nt, Homo sapiens
agaccccaggccagaggaacaagcagccgacacagaaagccaaacgcaggcccggggcgaaaggagcaaaagg

SEQ ID NO: 240095 - RNA, 71 nt, Homo sapiens
caaacaaccggggcagacaacagagacgcggccggagcccccccagacacacgagggggacaccgccagcc

SEQ ID NO: 240096 - RNA, 50 nt, Homo sapiens
gacaaaagggccaaagaagggagagagagcaaaggggaccggacaacaca

SEQ ID NO: 240097 - RNA, 72 nt, Homo sapiens
gacccaacacacgcagcggggggacacacgcgaccggcgaggcccaccaagccagaaccggagaagcacaag

SEQ ID NO: 240098 - RNA, 61 nt, Homo sapiens
gcccaccagcggagccgcaacaaaggccaccgcgaccgaggccaacacgggcggccaggcg

SEQ ID NO: 240099 - RNA, 84 nt, Homo sapiens
cccaaaggaggaaacagcggcaagccacagacgcggcccccaggcacgaagcgaagaagaggagagaagcagcggcgcagacga

SEQ ID NO: 240100 - RNA, 78 nt, Homo sapiens
gaggggcagccacccccgcgccacgcagagccccgccaggaagacacgccggggaacgaagcagaagacggagggggg

SEQ ID NO: 240101 - RNA, 82 nt, Homo sapiens
gggaagccccggcggagcccgcagccccgccggcggcagacgcagacaaacaaaacaagaagccgaagaagaccggggaggc

SEQ ID NO: 240102 - RNA, 72 nt, Homo sapiens
caacaacgagccaggaggccgcgcggcgagagaggagaaagcacacccaaaggaagagacccagacgaagag

SEQ ID NO: 240103 - RNA, 80 nt, Homo sapiens
gaagaaaggacgacagccagagaggcacgccacacacagcccccaagaaagagagcccaagcggaaagagagcaaaaaga

SEQ ID NO: 240104 - RNA, 83 nt, Homo sapiens
ccggccggccaggaggcgaggggccggcgagcagagagaccgcaccacccgggaacgagcaggagcaaagagaaaggaccaca

SEQ ID NO: 240105 - RNA, 70 nt, Homo sapiens
acaagaacaaaaacgaggacagaaggcggagaaggcccaacagcgaccccagccccccccggacaacagc

SEQ ID NO: 240106 - RNA, 66 nt, Homo sapiens
agcagccaccaggagcccgagagagaaggcgaaagacccaggcagacaagccggaacacaggaacc

SEQ ID NO: 240107 - RNA, 81 nt, Homo sapiens
aaaccgagcaagagagagcaagaggaagcagggggaaagaggacaacccccaagaaagggagcccagaacgaaacaaccca

SEQ ID NO: 240108 - RNA, 56 nt, Homo sapiens
gccagcgaaaacgcccagcaaaagaagcgaaccgggagcgacacaccccagagaga

SEQ ID NO: 240109 - RNA, 78 nt, Homo sapiens
agcacagagacgaagaggaccaggagcaaacagaagcaaaggccgaagaggaccaaaacaaagcaaggaagccgcacg

SEQ ID NO: 240110 - RNA, 75 nt, Homo sapiens
agacggcagaaaacggaaggaggccagacaaacccagcaagcaaccacgagagcacaaggacaaccaacaacccc

SEQ ID NO: 240111 - RNA, 64 nt, Homo sapiens
cccagcaggaaaccaagagaagggcgcgaccagccacagaagccagccaacacagcaggcggca

SEQ ID NO: 240112 - RNA, 93 nt, Homo sapiens
gccccgcgagcacagagcccgccgccgaccgccgcccgccacacccgccgccagacccgggaaaaggagaagagaaggaagccaaggagcccg

SEQ ID NO: 240113 - RNA, 72 nt, Homo sapiens
gccacacacagccggcccgcagaccggcggaaaaaagaagcaaaaaccaggggaagacccaagacgcagaac

SEQ ID NO: 240114 - RNA, 84 nt, Homo sapiens
cagcccagccccccccaaaccagaaccccagccagcacgacccggaaacaagcagcgcccccaagggcaggcagcaaaggcaca

SEQ ID NO: 240115 - RNA, 82 nt, Homo sapiens
aggcggcgcgggccgaggccgggacagcaccgcagcagagcgaaagcacacgcggagaaacgaggccgaagagcgaagacac

SEQ ID NO: 240116 - RNA, 81 nt, Homo sapiens
gcagaagcagagacaccaggacagaaaagacaggcgccaggagcacagaagagcgaggagggagaccaggaaagacagagc

SEQ ID NO: 240117 - RNA, 86 nt, Homo sapiens
ggaacgccggcccgagaaagcccgccagcaggaacaccagagcacacaaaccaccgccaaggaagaggcaaaacgcaccccgaaag

SEQ ID NO: 240118 - RNA, 63 nt, Homo sapiens
cccgggccacccccccgcgccgccggcacgcggagacaagccaaacgcaccagacgaacccaa

SEQ ID NO: 240119 - RNA, 67 nt, Homo sapiens
cacgcgaaaaaacacagacaagagcgaccagcagacaccaggggacaacagagccgacacagccaag

SEQ ID NO: 240120 - RNA, 83 nt, Homo sapiens
aagacacaaacaacaagggcagccccaacaaggacagggcccaagggagggacaaaggcaggacccgaggcgccagcagcagc

SEQ ID NO: 240121 - RNA, 70 nt, Homo sapiens
cccgggaacgccaaggagcagaggcgcaagacccgcgaacaaagggaaacacaagccggagcccgagccg

SEQ ID NO: 240122 - RNA, 50 nt, Homo sapiens
acaagggagcccccccaccacccccgacccccggaaagagccgcccgaga

SEQ ID NO: 240123 - RNA, 71 nt, Homo sapiens
acacgccgcacccgcccagcggagaccacggcaaccagaaaccaaaacggagagaaggagggccccaaagc

SEQ ID NO: 240124 - RNA, 68 nt, Homo sapiens
gcgccgcgcgccgggccgcgcccccaggagaaccaagaggcgaggcgaagagggagagaacaaggaag

SEQ ID NO: 240125 - RNA, 59 nt, Homo sapiens
cggagacaggaccgcggcgagcaaggggcaaagcaccgacggaccagaaaaagacaaca

SEQ ID NO: 240126 - RNA, 59 nt, Homo sapiens
gaaaaggacagaagcagcaaacagaaagcaccggaaacggaaaaacacgcacaggcaga

SEQ ID NO: 240127 - RNA, 53 nt, Homo sapiens
acaggagagagagagaggccagaaggacagaggacacagacggaagggagggc

SEQ ID NO: 240128 - RNA, 68 nt, Homo sapiens
gaacaggccagaggcacaacggaccgccccaaagagcaggaggagcaagcacaacaggccgaagaggc

SEQ ID NO: 240129 - RNA, 85 nt, Homo sapiens
ccgacaagaagaagagaacaaagagccgggagacggagcacggcgccgcggcaagagccaggagaacgaaccgggcagcaaagac

SEQ ID NO: 240130 - RNA, 108 nt, Homo sapiens
gacaggaaccacccgagggagccagccaaagagcaggaagcaggcgacaaacaagaaagccggaggacaaggaaaaagaggaaagcagaaagaaacccgcggaaagaa

SEQ ID NO: 240131 - RNA, 79 nt, Homo sapiens
gcaacggcggggcgcccggagcccgaggcggggaaggaaaacagcaacacagagcgaacaaaaaaccaggccggacgac

SEQ ID NO: 240132 - RNA, 70 nt, Homo sapiens
agaaggccacacacccagaaaaagaaacaggacacacaagcccaggacacccggcccaagacccggggcg

SEQ ID NO: 240133 - RNA, 68 nt, Homo sapiens
aagaaaagcaaacacgaggaacgggaggagggaagaaaagcgccgaccggaaaacagcaccaggaggc

SEQ ID NO: 240134 - RNA, 77 nt, Homo sapiens
ggcgcggagagcccaccacgcgggaagagaccagcgaagaaggcccgaggaaagagcaggaagacacccacgaggac

SEQ ID NO: 240135 - RNA, 51 nt, Homo sapiens
agcgcacacggcaagacagaggcacaaaaggagaaagcagaagaaacagga

SEQ ID NO: 240136 - RNA, 68 nt, Homo sapiens
gcgaacaggcggcggccaccgggacaggaagaggcagcagcgggaaaccagacacccgcccacaccgc

SEQ ID NO: 240137 - RNA, 81 nt, Homo sapiens
agaaccgacaggccggaaccgcgacccggcaagaccacccgcgccgggcgccagggcgcgagcgagagcgagaagcggccc

SEQ ID NO: 240138 - RNA, 57 nt, Homo sapiens
gagcgcccgggagcagaagcaccggaacacaagaggggcccagccagaaaagagccg

SEQ ID NO: 240139 - RNA, 84 nt, Homo sapiens
cccgcaaggaccgggccggggaacagaaaccgggggcccaccagccaacgggacaggacagagagacagagcagcccgcacgcc

SEQ ID NO: 240140 - RNA, 37 nt, Homo sapiens
gaaaaagcaagaggaaagcaaacaccagcaggaaaaa

SEQ ID NO: 240141 - RNA, 76 nt, Homo sapiens
cggcaacaaagaacacacggaagccaacacccagcaccacgggagacggcggagcccggccacagggcagcagacc

SEQ ID NO: 240142 - RNA, 81 nt, Homo sapiens
gaggcggccccagcggccggggagggcgaaacccagcaggcgcacacacaggaccgaggagagaaacccaaccccacaagg

SEQ ID NO: 240143 - RNA, 70 nt, Homo sapiens
caaggacccgcgagagacccagagcgaaaagaagcgagagagagaacagaaggacgaggacaaccaaagg

SEQ ID NO: 240144 - RNA, 60 nt, Homo sapiens
gcgcggccgccgccccgcccccaggagagcgagcacgcagcacgggggcaggggccgacc

SEQ ID NO: 240145 - RNA, 111 nt, Homo sapiens
caaaaagcagcaaagaaagaacagaacagaacaaagagaagcggcaggaaagcggaaaagcaacaacaggagaagagaagccagaaaagcaacaacagaagagaggagagc

SEQ ID NO: 240146 - RNA, 90 nt, Homo sapiens
agagaggcggggcgcccccgccacgcagccggccaccgccgagacccagcacacgccgaccagggaacgccgcagaaagaagaaggggca

SEQ ID NO: 240147 - RNA, 69 nt, Homo sapiens
ggaaaacccagaagacaccacggcaaggacaccaaaaggcaggcgacacggcagacccaaaaaacagga

SEQ ID NO: 240148 - RNA, 97 nt, Homo sapiens
cccgggaaggcgccggggccagcgcagccgcggcggagacgcacaggcccgggagacaacagccacacaaagcagcaacaggagcagggaagaaaag

SEQ ID NO: 240149 - RNA, 76 nt, Homo sapiens
accagcagaacagaaacaagaacggccggggggcgagcgaccgaaagacagaaacagagaaaccaacggaccccag

SEQ ID NO: 240150 - RNA, 60 nt, Homo sapiens
cacacccaccaacaacaccacaaaaccacagccaaggcagagagacgaagagagaagcag

SEQ ID NO: 240151 - RNA, 60 nt, Homo sapiens
aaagacccggaaagaagagacacagaggagccacacccccaggagaggagccaagcccaa

SEQ ID NO: 240152 - RNA, 79 nt, Homo sapiens
gcccagacaagaggacacgcggacaggacacagaagccagggggaggggaacagcagcggagaacacggcagagacaaa

SEQ ID NO: 240153 - RNA, 77 nt, Homo sapiens
aggagacaaaagcacaggaggagagaacgcccgcgaggccaggggggggagacaagggagaggacgcgccccaggcg

SEQ ID NO: 240154 - RNA, 77 nt, Homo sapiens
gggaaacggcaaagcgcagcccgcagacagaggggcgacgaccgcacaacagaagcagcgaaccagaacgggaagaa

SEQ ID NO: 240155 - RNA, 68 nt, Homo sapiens
gaaggccacagaagacgacggacagagagacacaggacgcgaggcacaggcaaaaacaccaaaaagaa

SEQ ID NO: 240156 - RNA, 83 nt, Homo sapiens
cgccgaagcagccgggagccggagcgggcgcggacgccgaggcaccgaggcaccagaggagagagacggggcgccggagccag

SEQ ID NO: 240157 - RNA, 55 nt, Homo sapiens
gcggaccagccaaacaaacaggaagcagaacccaaagaagcgaagcagaaaggac

SEQ ID NO: 240158 - RNA, 73 nt, Homo sapiens
cccagcccgccccggcgccccaaccccggcagccccagagccagcgggccggcaccggcacgaggagcgcaca

SEQ ID NO: 240159 - RNA, 88 nt, Homo sapiens
aaggcgcaccccagccagggaagcggccggggaggagaaaaggaagagggagagcagaaagacgagccgccggggaaaaagcgcagca

SEQ ID NO: 240160 - RNA, 79 nt, Homo sapiens
ccagcgccgccagcaagcaacccaagcacccaggagaaaaaaacacgagcacgggccccaggcgccagccagggggcaa

SEQ ID NO: 240161 - RNA, 78 nt, Homo sapiens
ccgagagccgcccgggccagcggccgcgcacccccggccggaggcaccagcgcccagagggggaaccccgggcggggc

SEQ ID NO: 240162 - RNA, 72 nt, Homo sapiens
cgccaagcaagagaagacggggcgagcccccccagaaaggaaaaccgcacggccaagcccacacagaggaaa

SEQ ID NO: 240163 - RNA, 80 nt, Homo sapiens
cgccggccggagcagcagcccgaggaaaagccccgcagggaggagggaaccaaccggggggaaacaaacacgaacccaga

SEQ ID NO: 240164 - RNA, 54 nt, Homo sapiens
aaacacccccaccgcccaggcaacaaagcacgccagcacccaggccgccccccc

SEQ ID NO: 240165 - RNA, 57 nt, Homo sapiens
gaggggccgcgccccaaggcggcgcgaagccacaagaaaggaggaagacgcacgccg

SEQ ID NO: 240166 - RNA, 95 nt, Homo sapiens
aaaccccaggcagcagccgacaggcagccgggcccaggcccgggagaaacggagggggaaggaccgcaggacgaaaacggcacccccggagagac

SEQ ID NO: 240167 - RNA, 83 nt, Homo sapiens
aggggcccgccaccacgcacgggcgcacggaggacgggaaaaccagcagcagaccccgcgagcaaaggaggaggaccacacca

SEQ ID NO: 240168 - RNA, 70 nt, Homo sapiens
cggcgcagagccggcgccacgccgcaaaacgaagcccgcaaagaggcacacccagaagccacaggagaag

SEQ ID NO: 240169 - RNA, 88 nt, Homo sapiens
ccccaccggggcgggacggggaacgccccggccacggacgcaggcccaagaccgagccaccgcacgggcagcagaacgaggccgggac

SEQ ID NO: 240170 - RNA, 73 nt, Homo sapiens
gccgcccccaggagcacaaaagggcgcgcaagaaacacgcgagcgagcggcaaagaggggccggaccacaagg

SEQ ID NO: 240171 - RNA, 83 nt, Homo sapiens
cccgcggccgcacccccgccccaggaagaaggaccggggagacaggaacacgggcaagacagcgcgggcaccgccgcagggcc

SEQ ID NO: 240172 - RNA, 74 nt, Homo sapiens
agagaggacagggacagggaccgggaagaagcagcaaagagaaaagcgcaaaggcagacggacaggagccacaa

SEQ ID NO: 240173 - RNA, 58 nt, Homo sapiens
aagcaaacaaacgggggacaacccaagagaagaagcgcgagcggcagacaaggcccaa

SEQ ID NO: 240174 - RNA, 89 nt, Homo sapiens
gccggggcgcccgcgcgcggggaccccacggggggagaaggacggcagaaaacgagacgccggcggcgaaaaaaggggacaagaccgga

SEQ ID NO: 240175 - RNA, 82 nt, Homo sapiens
ggcgacggaccggccaccaaagcacacccaagggaggacacaaggaggaagagcgagagaagaagcagaaggcaaacacagc

SEQ ID NO: 240176 - RNA, 50 nt, Homo sapiens
gagagccaaagaaggcagacggcgagacagagagcaacaaaaacagaaaa

SEQ ID NO: 240177 - RNA, 38 nt, Homo sapiens
gacacagggaaagccggaggacaccaagagaaagaaaa

SEQ ID NO: 240178 - RNA, 68 nt, Homo sapiens
ccaccccaaagaacacagaccaccaaggagaggggagacaacccggagggggagaaacacccacacag

SEQ ID NO: 240179 - RNA, 77 nt, Homo sapiens
cggaaaccaccaaggacaagacaaaacgccaaggcacccagagaggcccaagcaacggaaacccagcaagcagaaaa

SEQ ID NO: 240180 - RNA, 74 nt, Homo sapiens
ggggcgacgaggcgagcgggggccgggcagaccccaaggaccagacacgacaagagccacccgagaacaagaga

SEQ ID NO: 240181 - RNA, 58 nt, Homo sapiens
ggagacaaaccggagaaggagccaagaaagagaagaacagcaagaagagaaagccaaa

SEQ ID NO: 240182 - RNA, 104 nt, Homo sapiens
accgcaggagggagaccacagcaagacccaggaccccggaagccagaaaggacagagaaaccgaggcgcgaaacaggaaggccacagcagaagagaaggagacc

SEQ ID NO: 240183 - RNA, 82 nt, Homo sapiens
ggagcgagaacaagagacacccgacggcagaagaagcagaaccacaggacggccaaaggcaaaaaggccccaggaaggagac

SEQ ID NO: 240184 - RNA, 82 nt, Homo sapiens
cccagcccccagagcgggacacagagaacagaacccacggccgaggggaaggaaccagcccaaagaggacaacccagaggac

SEQ ID NO: 240185 - RNA, 80 nt, Homo sapiens
cgacagggccccaacccagaagacaaccgaccaacagagacaaaaccgggaagaaaagaaaggagcaaagcaacagaaga

SEQ ID NO: 240186 - RNA, 83 nt, Homo sapiens
ccgccccgcccggagccccggcccccacaggcccccaaaggaccaaaacgcaaccaaggaaaagcgcagagggaaacggaccc

SEQ ID NO: 240187 - RNA, 126 nt, Homo sapiens
gagcgggggaccagccccacacccccagaccagaccccccggcccaccgggcgggccagcacccgccgacagaccgaggaagccgacaggaccgggggcacggaggggaagcacccagaacccccg

SEQ ID NO: 240188 - RNA, 52 nt, Homo sapiens
ggaccccaccaggaccccaggaggaagaaggcaccacgacaaaccggagccg

SEQ ID NO: 240189 - RNA, 64 nt, Homo sapiens
aggagggaaccacacagagccagcaaaggaccagaaggaacggcggcacagggaagccggcaaa

SEQ ID NO: 240190 - RNA, 61 nt, Homo sapiens
aagcggcaccaggcaaaaacaaagcaaccccccagcagaagcgagcgcccgcgcacaacgg

SEQ ID NO: 240191 - RNA, 84 nt, Homo sapiens
aagccacccagaagggcggacccgaagaaggacggcgacccgccgaagcaccgcgggcgcgcgggagggagagcacggcgcacc

SEQ ID NO: 240192 - RNA, 72 nt, Homo sapiens
cggagaaacgcaggaaacacacagaagcgggacacaagagaacggaacgggagcggccgcagaccacggaaa

SEQ ID NO: 240193 - RNA, 41 nt, Homo sapiens
gcagagacccgggaggcgggagagccgcccgccccgccacc

SEQ ID NO: 240194 - RNA, 82 nt, Homo sapiens
gaaggacccgaaaccagcccacgccaggcaaggaggaccagagagagaagaaaaccggaccaaacagggggaaagagcccac

SEQ ID NO: 240195 - RNA, 68 nt, Homo sapiens
gaaggccggggcgcccggcgccggccgagaaggcagaggcgaggggcacagggaaaagagaacccgaa

SEQ ID NO: 240196 - RNA, 76 nt, Homo sapiens
cagacagcagagagagagcggaacgggagaaagcacgggaggagagggaccaagaaaggcccagggaccaaagccc

SEQ ID NO: 240197 - RNA, 74 nt, Homo sapiens
caccccccaggcccgggagcgcagggcgcgccaaggaaagaaaacccagaagacacgagaaaaacccaacggcc

SEQ ID NO: 240198 - RNA, 67 nt, Homo sapiens
acaggcacaaaaaaaccagcggacaaccaggaaaccccacagaagaacaaaagcggggcgaaagaaa

SEQ ID NO: 240199 - RNA, 76 nt, Homo sapiens
cgaggcgcagaaggggacagaacaaggagggcgaaccccgcgggggcccaccgacagacgagaaccggcaccggac

SEQ ID NO: 240200 - RNA, 79 nt, Homo sapiens
ggagcacagaagagcgaggagcgggaggccaccgccccaccagcaggcaacgccacagaccgccagcgccaggacacgg

SEQ ID NO: 240201 - RNA, 63 nt, Homo sapiens
cacgccgaacccagaacgggaggccgaggcgggcggaaccgagaaggcagcgggggcacagcg

SEQ ID NO: 240202 - RNA, 82 nt, Homo sapiens
gcagcagcaccagcccaagagaaggcgccggaccgaaggcgcgaccacgacgagaagcgggggccgcagcggggcaccaacg

SEQ ID NO: 240203 - RNA, 72 nt, Homo sapiens
aaaagagaggagcgaacgagacagaacaggaaaaaggacaacaggcacaaagagagaaggaacacccacagg

SEQ ID NO: 240204 - RNA, 81 nt, Homo sapiens
ggaggaggagcagacgccaaccagccggagaaaggaggcgagacagggccccccgacaccaaggaccgcgggccaccgccg

SEQ ID NO: 240205 - RNA, 67 nt, Homo sapiens
ccgggcgacggccaccaccgacaggggaacagaggcagccccccggaacccaaggcgggggacaaag

SEQ ID NO: 240206 - RNA, 74 nt, Homo sapiens
agaaaggcgacgagcgcccccaccaaaaaccaaggggaacaccaggacaacgagaaaaagaaaagaaccaacga

SEQ ID NO: 240207 - RNA, 45 nt, Homo sapiens
gggccaacagcaacagagagagccagcggagagcgaggagaaggg

SEQ ID NO: 240208 - RNA, 73 nt, Homo sapiens
aagcagcccacacagagaggaaccaagacccagggaagagcccagaaagaagcagacagcgacggcaggccgg

SEQ ID NO: 240209 - RNA, 72 nt, Homo sapiens
ccaacgcagggccgggccagccccacaaaggccagccgggaaggagcagagacgcgccagcaagggaagaac

SEQ ID NO: 240210 - RNA, 81 nt, Homo sapiens
ggaagggagcgcccgcgcagacccgacaagagagaaggccggggccgccacgccgggaaggaagccgcccccaacgcagac

SEQ ID NO: 240211 - RNA, 75 nt, Homo sapiens
gcacaacgccccaagagccaagaaaccagcgaccgggaggaacaggaggacccagccgcaaacaaagggacaccc

SEQ ID NO: 240212 - RNA, 73 nt, Homo sapiens
ggggcggccccggggggacccggcccgcgccgggacgaagggaacccgccgggcggcccggcacccagccccc

SEQ ID NO: 240213 - RNA, 56 nt, Homo sapiens
cagaaggcaacgccgcaggcacagccagccagcaggcaacaggcccagaccaggcc

SEQ ID NO: 240214 - RNA, 72 nt, Homo sapiens
gagaggagcgccgcggcagacgccgaggagagccccagcgcagcaaagagccggggacaacggaagacaagg

SEQ ID NO: 240215 - RNA, 47 nt, Homo sapiens
aacgacacaagcgacacgagccaaacgcgaggacgcagagagagcgg

SEQ ID NO: 240216 - RNA, 61 nt, Homo sapiens
gaagccaagcaaacgcagaaggacgcccacgagcaaccaagagcacacggaagacaaaggg

SEQ ID NO: 240217 - RNA, 79 nt, Homo sapiens
gcacccggggagcgacccagcaggggacccagccggaacgggagcagcagccccgagaaggaagaggaggaagcgaggg

SEQ ID NO: 240218 - RNA, 50 nt, Homo sapiens
cacggaccaccaaccgggagacgaagacaccacaggcggggcggagcccc

SEQ ID NO: 240219 - RNA, 52 nt, Homo sapiens
caaaagggccaaagaagggagagagacccgccggacgggagcccaggaccag

SEQ ID NO: 240220 - RNA, 74 nt, Homo sapiens
ccccgcggggcgcgagccagagccgccagccccaagcaaagacacagaagagaggaagcagaggggacgcgcga

SEQ ID NO: 240221 - RNA, 68 nt, Homo sapiens
agagaccacggaagcagacccgcggagcggcaagccacccgcgacgggacgggaaaaagaaaaaggag

SEQ ID NO: 240222 - RNA, 53 nt, Homo sapiens
gcccgaagaaaacgggggcgccaccgggccgcgggggcaggccaggcgcgggc

SEQ ID NO: 240223 - RNA, 81 nt, Homo sapiens
ccagaagaggagccagcacagcaccagcaggcagccaaggccgaaacaacgaacaaggacggaccaacgaggagcaagaaa

SEQ ID NO: 240224 - RNA, 79 nt, Homo sapiens
gcgaagaggacgagggggccaaggcccccggggccaaacacacaggaacgccagaccccagccgagggaggcaacagca

SEQ ID NO: 240225 - RNA, 82 nt, Homo sapiens
agggaaggacggggccggcccccgggaccccggccgcggagcgacgccgacggacggccaccgcagcgcccgcaaggaagag

SEQ ID NO: 240226 - RNA, 56 nt, Homo sapiens
caagaagacagaccccgaggagacgaaaccagagacacacagaccacagacagccc

SEQ ID NO: 240227 - RNA, 71 nt, Homo sapiens
gcgcacgcagccaccccgccaagcgacggcggcccagacaccccgagcagagcaaacgcagaccaggcgga

SEQ ID NO: 240228 - RNA, 85 nt, Homo sapiens
ccaccgaaagaacgcccagcacccaccaccagcaggaccagcacggaggcaaacagaagcccacccccaacggggcaaccaggga

SEQ ID NO: 240229 - RNA, 71 nt, Homo sapiens
aaaacgaagccaaaacaacagcaggaaaggcggaaaccccggaggggaccaaagcaggaagcaggggagcc

SEQ ID NO: 240230 - RNA, 112 nt, Homo sapiens
cgagccaggcaccgcacccagccccaggcgagacaaggccccaccccacccagcccagcagcgcacgaaccagaggacggggccgcgccagaaacgcacagggaacaaaacc

SEQ ID NO: 240231 - RNA, 42 nt, Homo sapiens
ggggggccgccgggcgcggcaagaaagacagaaccagcacag

SEQ ID NO: 240232 - RNA, 54 nt, Homo sapiens
aagaacggacaccgcccaccaaccagagagccaagaagacaaacagaccccaga

SEQ ID NO: 240233 - RNA, 105 nt, Homo sapiens
cggacacgggagagaggccgggcgagcagcaggagcaccggcccaagaaacagcgagacgacgggaccgaaggaccccgccagagacaaccgagcgccaggagag

SEQ ID NO: 240234 - RNA, 72 nt, Homo sapiens
aagacgggacacagagcacaagcaacacaaggaccgcagagaaacgccccgagcacaaggaacaaaaagcgc

SEQ ID NO: 240235 - RNA, 85 nt, Homo sapiens
aggggaccccaacgaagagggagaacggcaacccaccagacaccagccgaagcacccaagccagggagcggcaaaagcaaaaggg

SEQ ID NO: 240236 - RNA, 74 nt, Homo sapiens
ggacagaaaaacagaccaaagaaccggagagccggaaacagaaggccaagacccagcgacagagcagcgacaca

SEQ ID NO: 240237 - RNA, 88 nt, Homo sapiens
ccgagcggccaggacgacgaggagcagggccgacgcgcaggggaggaagcagccaggggaagacgcccccaccacagaacggaggagg

SEQ ID NO: 240238 - RNA, 54 nt, Homo sapiens
ggccggaggaggacggccggcacgcgcccaaagggagcgaggaacgaacaaaac

SEQ ID NO: 240239 - RNA, 57 nt, Homo sapiens
cgcgcacccccggccggaggcaccagcgcagaaggaacgagggagcacggagggaaa

SEQ ID NO: 240240 - RNA, 79 nt, Homo sapiens
gcacaacgaaggcagcccgcgcaggaacagcaaccggaagaggcacaggagggcagaccaaaagcacaaaaagaacggc

SEQ ID NO: 240241 - RNA, 62 nt, Homo sapiens
ccaggcgggccgcgcccgagcccagagcggcgcggcgcgggccaggccacggaagaaggccg

SEQ ID NO: 240242 - RNA, 82 nt, Homo sapiens
cccagccgagaggacgcggcggaaacgaaggagccgggaaagcagcaaagggggggggcggccaggccgcaggccaggggaa

SEQ ID NO: 240243 - RNA, 110 nt, Homo sapiens
ccgcaccaggaggaaaacagagacaaagacaacgaaagagacagcacaaaaagaaacaacggacacccccgggaacccaccaaaaaggacaccgaaagacgggaaacaga

SEQ ID NO: 240244 - RNA, 74 nt, Homo sapiens
gcagaagccgcgaaaaaggggggccgaggcgcgagaccgcacagcaaggaaagcacccagagaaggaccggaag

SEQ ID NO: 240245 - RNA, 83 nt, Homo sapiens
agcgcaccacaaagcgcgcaacgccaacccaggcgagaggccccgcaggcagagcaaggggaaggcccagaagacccacaaac

SEQ ID NO: 240246 - RNA, 74 nt, Homo sapiens
aaaacaacgagcggacccaggcaggcaggccaggacacccaaaagcaaaagaccagaaaagaaagccagaacga

SEQ ID NO: 240247 - RNA, 55 nt, Homo sapiens
ggggggaagcccgcgccgccggcaccagaggagacggcccaccgaaggaaacacc

SEQ ID NO: 240248 - RNA, 79 nt, Homo sapiens
agcggcgcccgcaggggccagacagcaaagccgacaggcagccggggaggagccgaaggaaggaacaggcagccacgag

SEQ ID NO: 240249 - RNA, 52 nt, Homo sapiens
gagggcaagacagcgagggacgaaggagaccgcgcagacaaggccgacgcgc

SEQ ID NO: 240250 - RNA, 65 nt, Homo sapiens
aaaggaaagccaaaaaggagaaccccagaaagaaacgcagagggacggaccggcccccaagcccc

SEQ ID NO: 240251 - RNA, 57 nt, Homo sapiens
gacggcagagcggacaccaggagcccagcaggacaggcgccagagacgcgcacgaaa

SEQ ID NO: 240252 - RNA, 73 nt, Homo sapiens
agaggacgggaaccccagacaacagcggaggcgcgccacggcagagccccagggaaagagcagggaagccaga

SEQ ID NO: 240253 - RNA, 89 nt, Homo sapiens
gagccgcaggagagacacgcgggccgaccccagagaggcgcggacagccggaaccaaaaagaagccccagagccggggccaggagcccc

SEQ ID NO: 240254 - RNA, 67 nt, Homo sapiens
gggaaccagcggacgcggaggcccaaccgaagaaaacaaggggccaccaaaagaaaaacaccaccag

SEQ ID NO: 240255 - RNA, 71 nt, Homo sapiens
ggaagcggacagacgggcagcgggacccaaagacaggaccacgcaccagcagagaaggaaagcaaaccgaa

SEQ ID NO: 240256 - RNA, 71 nt, Homo sapiens
acaaggacagggcaacaccgaagaaagagccaaacgccaaggcggcaggccgcgaagagccagaagagagg

SEQ ID NO: 240257 - RNA, 77 nt, Homo sapiens
ccacaccgcgagaagacaaggaccacagggcgcaagagagaaacggagagggaggggccgggacggaggggagcgcg

SEQ ID NO: 240258 - RNA, 86 nt, Homo sapiens
ccggaaccacgacagacagaccagaaaacccacggggacagaagcccaaaggcccaccaaggaccgacgagacgcgcgcagccgga

SEQ ID NO: 240259 - RNA, 78 nt, Homo sapiens
cgacggcccagcaggcggggaagagaaaggaaagggaccgagggggacgaaagcggaaaaccgcaacagcaaagggaa

SEQ ID NO: 240260 - RNA, 69 nt, Homo sapiens
aggcaccaaacgaacggaggcgaggaggcaagcagagacggggggaaacgacagccaagccaaggaggg

SEQ ID NO: 240261 - RNA, 34 nt, Homo sapiens
caagacaggccaaggacagaacccgggccgagac

SEQ ID NO: 240262 - RNA, 56 nt, Homo sapiens
ccgggccccccagcagacgcgagagaagaagaaggaggccgcggccagaaacccaa

SEQ ID NO: 240263 - RNA, 69 nt, Homo sapiens
ggagaccgcccagcgcagcgggaaagagaacagagagccggggacagggaagggaccaaagagaggaag

SEQ ID NO: 240264 - RNA, 70 nt, Homo sapiens
ggcacggggagacagggacggaaaaacagacagacggacgggggggcagggacgcacaagggaagcaagc

SEQ ID NO: 240265 - RNA, 52 nt, Homo sapiens
gcacgcagcagccgcgaccgcgcagcggagccaaacaaaggaacgccaagcc

SEQ ID NO: 240266 - RNA, 50 nt, Homo sapiens
aaaaagacaagcaaggcggagggcaggaggcaaaaagggagcgggaccac

SEQ ID NO: 240267 - RNA, 54 nt, Homo sapiens
cgcagggcgcccccggccaaacacacaggaacgccagaccccagccgagggagg

SEQ ID NO: 240268 - RNA, 73 nt, Homo sapiens
aggaagagcccgccgaagggagcaacagcgagcaacaggcaacgaaaacagacaaaacaacggaaaagcaggg

SEQ ID NO: 240269 - RNA, 73 nt, Homo sapiens
gacggaaagaagaagaccagcagcgaaaacggaaacacaagagaccagaggaaggccaaagaaagacaagagc

SEQ ID NO: 240270 - RNA, 80 nt, Homo sapiens
ccaggacgggcggaggcggggggaccggcgggcgggacagcccagagcaagcacacggaggcccgggagccagaccggga

SEQ ID NO: 240271 - RNA, 32 nt, Homo sapiens
ggagagcccagagacacaggaacacgggaggg

SEQ ID NO: 240272 - RNA, 73 nt, Homo sapiens
gcaacccagaccacccacaggagcaacaggaagggccaaagccccaagaacccagccacgcaaagcggggaga

SEQ ID NO: 240273 - RNA, 69 nt, Homo sapiens
gacggcacgggacccccagcacaggcagcaggccgggagagaagcgggaaaacggcacaaggcgacgag

SEQ ID NO: 240274 - RNA, 81 nt, Homo sapiens
gggaaccggaagcgcccgaggcccgggcccgcgggggcaaccgggcgcagacgaggccggcaagaagccaacggagaacca

SEQ ID NO: 240275 - RNA, 54 nt, Homo sapiens
gacaaaagggccaaagaagggagagaggacaccagcagccgcaacggcacacac

SEQ ID NO: 240276 - RNA, 73 nt, Homo sapiens
aaaacggcaaccacggaccggcaaaaggcaagccagcaaacacaaggacaccccaggcgccccacagacaaaa

SEQ ID NO: 240277 - RNA, 84 nt, Homo sapiens
aggccaccaagggaccaagccaggaggccaccgccccggacacggcccaccacaaacgcaaggagccccagaggccgaaggaga

SEQ ID NO: 240278 - RNA, 91 nt, Homo sapiens
acccagggagacaccgaaaagaagagaaaccagcgcggggaagaaggcagaggcaaggcggcagcaaaacgggcgcccgggcagaagcaag

SEQ ID NO: 240279 - RNA, 57 nt, Homo sapiens
aaaaaccgcacgcgaggaaccgacccaggaccccggggcagccaagccacaaggcca

SEQ ID NO: 240280 - RNA, 79 nt, Homo sapiens
ggaacacgaaaggaccaagaacacagccacaagaggaaccgaaggaaaagcacagaaaagagacccaccaagggcagaa

SEQ ID NO: 240281 - RNA, 71 nt, Homo sapiens
cgggcagaccccaagagaaaggagccccccaaggggagaagaagcaagaggagaccagagaacaccagaag

SEQ ID NO: 240282 - RNA, 50 nt, Homo sapiens
cgaggcgaggggaggagggcagggacagacggaccccagcagccaccccg

SEQ ID NO: 240283 - RNA, 51 nt, Homo sapiens
agagccccccacgcaacacagggagggcaggcaaggaagagaaaaggaacc

SEQ ID NO: 240284 - RNA, 61 nt, Homo sapiens
cgaaggggaagagcaagagcagcagggaggaagagggaggaacagcagcggaaacaagcac

SEQ ID NO: 240285 - RNA, 57 nt, Homo sapiens
ccagggggaagaccagcaagaccccgcaaaggggcgagaaccagcgacggagcacgc

SEQ ID NO: 240286 - RNA, 69 nt, Homo sapiens
gcacaagcccaagcccacccgagagggaggaacgagggaccgggggacgacgggggacagaagaggaaa

SEQ ID NO: 240287 - RNA, 81 nt, Homo sapiens
gcgcggccagaacggagccccaaccgcgcgccgggcccaaaggagcgcaaaagcgccagaacagggcaggaggagaggaaa

SEQ ID NO: 240288 - RNA, 70 nt, Homo sapiens
aaccgccagcagaagaaacggcacaagacaggagagacaacggaggcaagaaagacggagaagcgagaag

SEQ ID NO: 240289 - RNA, 73 nt, Homo sapiens
gggcacaagaacgaggcgcccccacgacccccagacgccggggcccggcgccaccaccggggagccagagcaa

SEQ ID NO: 240290 - RNA, 57 nt, Homo sapiens
gaaagaacaggccggggaaacgaagagaaaagagaggcgcgggaagggacgccaggg

SEQ ID NO: 240291 - RNA, 90 nt, Homo sapiens
aggggcggggccccgcacagagagccgaggcgccccgcgggagaaggacccccgcgccggcgccggggaaggaaccagaacggcaccccc

SEQ ID NO: 240292 - RNA, 81 nt, Homo sapiens
agaagggagcggaggacacgggggccacaaagccccccggagacgcaaccaaggaaggaagagggaaggaaaaagaagacg

SEQ ID NO: 240293 - RNA, 75 nt, Homo sapiens
acacccaaggagcacaagagcgccccaagcaaggaagcgacaggaaagcaccgaaaggagagggagagcgaccaa

SEQ ID NO: 240294 - RNA, 53 nt, Homo sapiens
gacccaccacaccacgggcggccccagaaggcgcgacccccgcgaagaccccc

SEQ ID NO: 240295 - RNA, 58 nt, Homo sapiens
ggcagagacaagcccccccaagacgagacagaacaccacccggggaaccgaaccagag

SEQ ID NO: 240296 - RNA, 74 nt, Homo sapiens
cgccacacgccaacacagcagagaggaggcagagagcccagcccccagaagggacgccacagggcagcaggcga

SEQ ID NO: 240297 - RNA, 57 nt, Homo sapiens
gaaaccacgacccacagaaagggacaagcaaggggccaaggagccaaggaggaaacc

SEQ ID NO: 240298 - RNA, 64 nt, Homo sapiens
gaacggggcgcccaggccgcccgacccaaagggaaaacagaaacaggacggggaaggaagccac

SEQ ID NO: 240299 - RNA, 80 nt, Homo sapiens
gggggccgcgggcacccgacaccggaacgacagcagggaagaacggaaaccagagaaagaaacgcccccacacaaaagcg

SEQ ID NO: 240300 - RNA, 64 nt, Homo sapiens
aagcaacgaacccacagaaacgccaaacaggaagagcaccacgaaggcaggaagcaggcccgag

SEQ ID NO: 240301 - RNA, 84 nt, Homo sapiens
gccccaagggcgaaaaaaaagggaagaggagacaccccgggggccccgagcaaaccagggggggcggggaggacagcagcgagc

SEQ ID NO: 240302 - RNA, 78 nt, Homo sapiens
ggggcgcgcaggccgcgacgagggcgcgagaaaccccaccacgcggcaggggccgccgaggaaaaagcaacaagaaga

SEQ ID NO: 240303 - RNA, 79 nt, Homo sapiens
cggcacagggaggccagccggagaagcgagcagcgggcggggccccgagcagacagcaggaaagaagaagccccggaca

SEQ ID NO: 240304 - RNA, 68 nt, Homo sapiens
gcagaaaggagggcagaccggcagcccagaagaggggcacaggggcacgaaaaacacaccaaagaccc

SEQ ID NO: 240305 - RNA, 73 nt, Homo sapiens
gaacccagccgcaccgacagcgcacgaaacacacaaagaaccaccaccgggaggaagccagacaaccccaggg

SEQ ID NO: 240306 - RNA, 83 nt, Homo sapiens
gggacggaggcccagaaacggcccagccacgcccaggccaggccaggcccgccgccgccacagccagccacgggaaagcggag

SEQ ID NO: 240307 - RNA, 79 nt, Homo sapiens
gaaggacccgaaaccagcccacgccaggcaagaaggagcggcaaacagcccgacgccccagagggccaaagcgggacca

SEQ ID NO: 240308 - RNA, 79 nt, Homo sapiens
acacggagcgcgccggccccacgggaaacaaaacacaaccaaagcccaccagaggacagacagaaagcaccaagcggac

SEQ ID NO: 240309 - RNA, 87 nt, Homo sapiens
gcagcgacagcaaccccgccacgccgccaccgcaggccgcccgcagccgcccagccggccgcaggacacagccagggaagcccagag

SEQ ID NO: 240310 - RNA, 58 nt, Homo sapiens
gcggcggccaggccccagacacagacgagcaggggaaggggccccaagcaggagcgcg

SEQ ID NO: 240311 - RNA, 80 nt, Homo sapiens
cgagagaggaccccggacacgaaagccgggaaagccagaggagcagccaagaagccccccaggggcccgcagaccaacaa

SEQ ID NO: 240312 - RNA, 68 nt, Homo sapiens
acaccaagcgccgcacaagggagagaaagaacaaagacccgacagcaaacgaagaaaaccaaaacaag

SEQ ID NO: 240313 - RNA, 82 nt, Homo sapiens
aacaagaaggaccggacccgagcgggaggcacccggaggcccccgcgcccaggagaagacggaccaaaggagaaggagagcg

SEQ ID NO: 240314 - RNA, 79 nt, Homo sapiens
aaggcccccaacaccaaaggcagaccgagccccgaacgcggggaaccaccacgcagaccaccagcacgacaggggagga

SEQ ID NO: 240315 - RNA, 79 nt, Homo sapiens
cgggcccgcggaccagccagggcacggccgggacggaaccagacgccgcaggcccacgcagcggaggcggggaaaggcc

SEQ ID NO: 240316 - RNA, 78 nt, Homo sapiens
gaacgagccgagcccacggagcgagacaacagaccggcacgcgccggcccgagccgccggcgagagaagggcacaccc

SEQ ID NO: 240317 - RNA, 83 nt, Homo sapiens
gaggagccgcgcccgcgcgcacggcgcagccgcggggcgcaggaggcgggcacagcgccaagaaagagccgcagacgcacagc

SEQ ID NO: 240318 - RNA, 60 nt, Homo sapiens
cagccagcaaccccacacccacggcgcaaccgcaccagaccccccaggcgccccgccgcc

SEQ ID NO: 240319 - RNA, 77 nt, Homo sapiens
ggacaagagcagagccaggggaggccacaagaaacaaggggggaccccaaaggagccagaaacccacaaaaagcaaa

SEQ ID NO: 240320 - RNA, 68 nt, Homo sapiens
cacacagaagaggaaacagaacaggggggcacgaacaacaagacaagcaaccaagaaagcgacaagga

SEQ ID NO: 240321 - RNA, 74 nt, Homo sapiens
ccagccaagcggaaaaccccgacccgcaacaaccaaggcccagccggccccgggaccaaggacacgcagacccg

SEQ ID NO: 240322 - RNA, 77 nt, Homo sapiens
cagcgaggaagcaaagcacgagccaaagccggcggacagcagacgaacgaaaggccccagggcggcccgcacgcacg

SEQ ID NO: 240323 - RNA, 79 nt, Homo sapiens
ccgccaaggcaccagcaccccagaggggagagaggacacggcgggccgaccaaggaccccaagagagacggggcgccag

SEQ ID NO: 240324 - RNA, 60 nt, Homo sapiens
cgagcgacggcgcggcggagacgccggcgcccccccccccgccgagaggggcgccaggcc

SEQ ID NO: 240325 - RNA, 73 nt, Homo sapiens
acggggaccccggagcccagaagacagagggcgagcagccgaggaagaagaaggcagcagaaaagagaagagc

SEQ ID NO: 240326 - RNA, 69 nt, Homo sapiens
cgccaagccgccgcgcagccgcgcccggacagggaggcacaaggggcgaagaagaaccggacaggggcc

SEQ ID NO: 240327 - RNA, 70 nt, Homo sapiens
cgggaacccccacgggacaggagggccccaaggcggcagccccgaccgacggggcaacgcgaagaaacac

SEQ ID NO: 240328 - RNA, 69 nt, Homo sapiens
cggagagacgagagcgagcgacccagcccgcgagcgagcccgagcgggaagaagccgcagcaagccgca

SEQ ID NO: 240329 - RNA, 68 nt, Homo sapiens
cggcgccggcacgagggcaaagaagaaggcacaagaaagcagcggaacgaggcgcgacacaccagcgg

SEQ ID NO: 240330 - RNA, 57 nt, Homo sapiens
cgcgcaggacacacaagcacaacaacaaaggcacaagagagagggcacaggacagag

SEQ ID NO: 240331 - RNA, 73 nt, Homo sapiens
ggccgggagcggagcagacccccagccggcgagacagggaaagaaaagaggcccggaagagagccaccacgac

SEQ ID NO: 240332 - RNA, 77 nt, Homo sapiens
ccagaggagggagccggagaggagcaaaggaagagacgaaaaccacggcacgcccaccaccgaggccgccacggcgg

SEQ ID NO: 240333 - RNA, 75 nt, Homo sapiens
agcaagagcgaccggaggcccgagaagaagacaagagacacagcaagacaagggaaggggaagcaggccaaccca

SEQ ID NO: 240334 - RNA, 75 nt, Homo sapiens
acagaacaaagagaagcggcaggaaagcgcacaagacacagaccgacagagaacacgggcgcccagcagcccagg

SEQ ID NO: 240335 - RNA, 73 nt, Homo sapiens
aaagagaagaaaaaagcgcaccagcccggaacccgaaacagaagcggcaccagacacagacggccaccccccc

SEQ ID NO: 240336 - RNA, 85 nt, Homo sapiens
aggaacgacaaaccaaagccagaaacagcaaagccgaggccagcggccgaggaaaagaaggcgaacagaacgaaagaccccaaga

SEQ ID NO: 240337 - RNA, 77 nt, Homo sapiens
cccaagccgagcagacggcacgaagggcggccgccgccgagaccaggcacggaccaggaagcccccccccccgacgc

SEQ ID NO: 240338 - RNA, 68 nt, Homo sapiens
aaagcaccggcaggaggagcaaagcccacaggagggacgcccggagccagcggaggcacccgacgaac

SEQ ID NO: 240339 - RNA, 66 nt, Homo sapiens
ccagacaggagaagaagggaaaaacggagcaacgcaaggcaggcaacaagggccgccggcccaggc

SEQ ID NO: 240340 - RNA, 59 nt, Homo sapiens
acaagagaaggaaaaggaccccaacgcagacacgaaggaagacacacgcaaaaagggac

SEQ ID NO: 240341 - RNA, 55 nt, Homo sapiens
ggagcagcccgaccagagacgggaacacgagcgcgaccaccccacacagaccgcg

SEQ ID NO: 240342 - RNA, 67 nt, Homo sapiens
agggagaccaagagacagacaccgccccgagacgaggagacggcgcaggaccggggaaccgccaaag

SEQ ID NO: 240343 - RNA, 71 nt, Homo sapiens
ggagcaaaaccgacaagcagcccgcaggcagcaaacaacacccaacagcccaaagcaaaggagcaacagcc

SEQ ID NO: 240344 - RNA, 58 nt, Homo sapiens
acaaccagggcacgcggaagcgcaggggccaggaccccaggcgagaaggggagacagg

SEQ ID NO: 240345 - RNA, 76 nt, Homo sapiens
gaagcgaagccgaaaaaggcagcagcgaagcaagcgcagcagagggaacccaaccaggaaagaaggcagcgagcaa

SEQ ID NO: 240346 - RNA, 79 nt, Homo sapiens
ggagccccgcgccgggggagcacgcagcgggcaagggaagaccaccgcagggcggccgagacggagccgcgcgcccagg

SEQ ID NO: 240347 - RNA, 81 nt, Homo sapiens
cggccaagcaaccacgcggggagccgacgccgaggcccaccgccaccgggacgacacaagaccaccaccaccgcggacggc

SEQ ID NO: 240348 - RNA, 87 nt, Homo sapiens
gcaggacccgaggccaggagccaggggcccagaagcgggacagcaagggaggcagcagacgggaagaagagagaaaacaaaagcgag

SEQ ID NO: 240349 - RNA, 73 nt, Homo sapiens
caaaaacaacagcagcacagacaaggaagagaccgggagaaaacaaccaagacagcagagagcacaggcagag

SEQ ID NO: 240350 - RNA, 67 nt, Homo sapiens
gccgacacgcggcccccgaccgggagaaaagaagcagcccacgaaccccgacaacagagcagaagcc

SEQ ID NO: 240351 - RNA, 76 nt, Homo sapiens
ggccccggcccacaggggggggcaaacccgagagaacggggagaaagaagagagaccagaaacgagaggagaagaa

SEQ ID NO: 240352 - RNA, 77 nt, Homo sapiens
ggccgggccgccgcccgccccggccaccgccccgggaagcccggaaaggcagaagccaagaccggcccgaggcggcc

SEQ ID NO: 240353 - RNA, 54 nt, Homo sapiens
ccacccaaacgcggcacgggaggacaaaccggcgaccacacacggggacgacgg

SEQ ID NO: 240354 - RNA, 65 nt, Homo sapiens
gacgcagggcgcccccgacggaagggaccagccagagagaagcaacaaccagggcacacaccaac

SEQ ID NO: 240355 - RNA, 62 nt, Homo sapiens
cagcccagcaccgacagccgacgcgcagaagcagagccaccgggaacgggaagaagaagaag

SEQ ID NO: 240356 - RNA, 88 nt, Homo sapiens
aggcggcgcggagagggggcgcgagcggggaaagagagcaagcgcaacgcgaaaaagggcccgaagcaaagagaaggaggcgcaggag

SEQ ID NO: 240357 - RNA, 94 nt, Homo sapiens
aaagagcaagggcagacagcggcaacagaagccagaccggcgcgagaacaacggaccagaagcaccagaaacaggaagaaaaaaaggccacggg

SEQ ID NO: 240358 - RNA, 77 nt, Homo sapiens
gaaaaaggacaaaagccaagaggaggacagcgcacacagcaagcacgaggaacacaagaggacagcgaagccccgcc

SEQ ID NO: 240359 - RNA, 71 nt, Homo sapiens
caggcagaagaaggagccagcagagcgccagggagacggacggaacgcggcgcgaccagaaaaccgagaaa

SEQ ID NO: 240360 - RNA, 54 nt, Homo sapiens
gagaggaagaagaacgacccgcccggggcagcagggaacagacggacagagaca

SEQ ID NO: 240361 - RNA, 65 nt, Homo sapiens
agcgaagcggagggggccccaccaaaaccccgaaaggaaagaccacagcaagaccacgcccccag

SEQ ID NO: 240362 - RNA, 71 nt, Homo sapiens
acaagccaggggagaaaagaaggacgacaggcaaaagccaggcagcgagcgggagcagacagggaaccgaa

SEQ ID NO: 240363 - RNA, 57 nt, Homo sapiens
gaaccagacacgcaaacagccggcggaagaggaccaagaagggggcagcgcgggaac

SEQ ID NO: 240364 - RNA, 71 nt, Homo sapiens
aagaacgcagagcggagggggaccaccccaggaagaagacaacagaccacgaaaacccggaagagcgagag

SEQ ID NO: 240365 - RNA, 75 nt, Homo sapiens
caaaaaggaccacgaaggcgcccggccaggagagggaccagagggagcggaagcccgagagccaaacaagaccca

SEQ ID NO: 240366 - RNA, 52 nt, Homo sapiens
aacggcagcagaaccgagggagaccacaaaaggccccagccaccaggagcag

SEQ ID NO: 240367 - RNA, 81 nt, Homo sapiens
gcccaggggagccagaacaggagaaccagagagagggggggcccagaagagaacggccgaggcagccccaccagcaacagg

SEQ ID NO: 240368 - RNA, 88 nt, Homo sapiens
cgcggggagagcgaggcggggccgccggggccgccaggagcccgaccgggagaggacaagaccacgagccagccccgcaagcccaaga

SEQ ID NO: 240369 - RNA, 73 nt, Homo sapiens
agggcaaaggacagagccaacgcgaagcggccggaaaccggcccagaggagagaagcaggcccagcccccagc

SEQ ID NO: 240370 - RNA, 90 nt, Homo sapiens
acaacacccaggcccacggccaggcaaaccggacagggagacggcccggcggcccggagagcgacacacgcagggcggaagaagcagcca

SEQ ID NO: 240371 - RNA, 75 nt, Homo sapiens
cacaccaaccaagaagagccagggaagagccaggccagggcccaggcgacccaggacaagacacgagaccaaagg

SEQ ID NO: 240372 - RNA, 66 nt, Homo sapiens
accgaggaagccccgcagcagcagcccaaaggaagccgccggaagcagcaacacagcaggaggagc

SEQ ID NO: 240373 - RNA, 84 nt, Homo sapiens
gaagccaccgggcggcagcagcagggacccccagaaggaccaccgagagcgcgccaaagaaaaaagccaaagccagaaaaaagg

SEQ ID NO: 240374 - RNA, 67 nt, Homo sapiens
ggaacacaagcaagcgagcaggcagcagcaaagagagggccgcaagagacaccacaaaaggacaccc

SEQ ID NO: 240375 - RNA, 78 nt, Homo sapiens
gccgccaaggacgccggcccgggaagagaagccagaacgcggcgagaccaaacccgagaggaagaggaagaacagacc

SEQ ID NO: 240376 - RNA, 67 nt, Homo sapiens
ggggcagccgggggggggaaggggcagggggaggcaaaggaggaagaggaaacgaacgcacagagga

SEQ ID NO: 240377 - RNA, 63 nt, Homo sapiens
gggggaacaccaccgggccgccaccgaggccccgaagcaggagagagcccaaaagcaaagcag

SEQ ID NO: 240378 - RNA, 48 nt, Homo sapiens
cgcccggggccgggcagcgagcccacacagaaccgagaagaaggcaca

SEQ ID NO: 240379 - RNA, 54 nt, Homo sapiens
gagaaaagacaaccagcaacagcccaaagacggagcgcgccagcgccgcagcgg

SEQ ID NO: 240380 - RNA, 77 nt, Homo sapiens
cgagcggcggcgcgggcccggagcagggccagagggggcgaccgggacaaacggcggaggcagaagaggcaaaccag

SEQ ID NO: 240381 - RNA, 117 nt, Homo sapiens
gaggacaggccaaacggaaagacgaaggggccccagagccaaggaggaaggggccgggagaaaaaccgcgacgaagggaaaccaaaaacgagggaaacgacaagaagaaaaacaaaa

SEQ ID NO: 240382 - RNA, 83 nt, Homo sapiens
ggggacagcaaccccggaggccggaggaacgggcccgcaagcgcgccgacagccgaaaagacgaggcgaggaggcgagacacc

SEQ ID NO: 240383 - RNA, 55 nt, Homo sapiens
agaagacaggaagcaagcgagagaaccccaaaggcccccaaagaaagccacagcg

SEQ ID NO: 240384 - RNA, 84 nt, Homo sapiens
ggcaaaacgcagagcgggggacgggcgcccggaggacgcagcacggcaggggccgaaccggccggggcagcgcaggagcgcgcg

SEQ ID NO: 240385 - RNA, 66 nt, Homo sapiens
caggagaagaagagcggagacagagaaagacagcagggcggcgacggcggcgcgaggaccgaccgg

SEQ ID NO: 240386 - RNA, 77 nt, Homo sapiens
gacggccaggagaacaaggcacacagagacagacaaagcagcccaagaagccacagggaaagccacagcgacaacga

SEQ ID NO: 240387 - RNA, 72 nt, Homo sapiens
gagaccccgagggagacacaggcggagaagaccaagagacagaagggacgggacgaggacccggggaagaca

SEQ ID NO: 240388 - RNA, 87 nt, Homo sapiens
gcagcgcggccgggaccgacgcaaaaggcgcccggagcgggccggcccaacggggcggcacacaaggagcgaagggcagggagaacg

SEQ ID NO: 240389 - RNA, 83 nt, Homo sapiens
cacccaaccccaaaccacgagaaccccgacagagccaagcagcccgggagggagggcgcgggaggggagggacgccgccgggg

SEQ ID NO: 240390 - RNA, 76 nt, Homo sapiens
caccagccagcacccacgccaggcccagcgagccagaagcccccccagcagggacaaccagggcagagagcagaag

SEQ ID NO: 240391 - RNA, 62 nt, Homo sapiens
caacagaagcccagccgacggcccacaagggcaagccgggacaccacagcaagaggaacggg

SEQ ID NO: 240392 - RNA, 60 nt, Homo sapiens
ggaggaacgaagacacggggagggggagacaacgaggggacccgcagcgaagagaagccc

SEQ ID NO: 240393 - RNA, 71 nt, Homo sapiens
gaaggaagccagaagaagcccacaagacagggacaagaggacaacgcagaaagaacacacacagaagcgga

SEQ ID NO: 240394 - RNA, 54 nt, Homo sapiens
acggacagaaaggccagggaagaaagccaaggcggagacagagggagaggccag

SEQ ID NO: 240395 - RNA, 71 nt, Homo sapiens
gaacagcaggacggaaggaaacagcaaagggaaaaggacccaaaaccaaagcccaggcgccaggagagcga

SEQ ID NO: 240396 - RNA, 77 nt, Homo sapiens
gaacacagaaacccgccccggaaacagggcgaggccaccgaaaccccaccccacccccagcggaagaggggcaggca

SEQ ID NO: 240397 - RNA, 75 nt, Homo sapiens
aggaccaagaaccaggaggaaccggcaacgcaagcgaagaccaaccacaggccacacaggcacgaacacgggacg

SEQ ID NO: 240398 - RNA, 83 nt, Homo sapiens
aagcagccgaccagccgcggagccgggggcaggaacaaaagaagacaccagaagaagccacagagcacccgcggccaaacccc

SEQ ID NO: 240399 - RNA, 37 nt, Homo sapiens
cggaaacagccacagcaggccccaaaagaagaagggc

SEQ ID NO: 240400 - RNA, 77 nt, Homo sapiens
acaacgggcaaaacacaggaggaaccccaaccaccgcaagggaaagcgcgagacaggggcaccccagacaggagcac

SEQ ID NO: 240401 - RNA, 81 nt, Homo sapiens
agggaaggcgccgcgccaggccggggggcgccgggacagaccggagcggggaggagcgccggccgaaacgagcgggcgggc

SEQ ID NO: 240402 - RNA, 79 nt, Homo sapiens
cagcaagacgccaggacccacggaagccagaaagagacgagagccgaggcgccggaaacaacagccaacaaaaccaagc

SEQ ID NO: 240403 - RNA, 82 nt, Homo sapiens
ccggggacgaaagggaaggacaggcagagcaaacaaggcaaaagcagaccggaaaacccaccggcaagaccacacccgaggg

SEQ ID NO: 240404 - RNA, 64 nt, Homo sapiens
acccgccgggccgaaccggaagggcaagacagggcgggaccaccaggagcagagcggaggccac

SEQ ID NO: 240405 - RNA, 75 nt, Homo sapiens
cccacaaggcaacacaggagcaggaggcccagaaggccacaacggacaaaaagacagcagaaagcaaaaagccca

SEQ ID NO: 240406 - RNA, 61 nt, Homo sapiens
gagacggagcgaaggccggaggggccaccacagagcccgcagggacacagcagaacaagca

SEQ ID NO: 240407 - RNA, 74 nt, Homo sapiens
cccgacaaagcgaaagcacaccaagcgaggaggcccggagaacggcaagcgcagaaagagaggcccaagaagag

SEQ ID NO: 240408 - RNA, 75 nt, Homo sapiens
aaagcagccaacagcaaagccaggaaagaaagggagcgccaaaaagaaaagaccccaacacacacagaacacgcc

SEQ ID NO: 240409 - RNA, 75 nt, Homo sapiens
aaagagcagaaaaaagaaggaagcccaaagacgcaaaggacgcaaaacgggagagcagagagagagcacgagcaa

SEQ ID NO: 240410 - RNA, 67 nt, Homo sapiens
acaaaaagaggccaagaagagagaccgccacagcagaagaaaagaagagcggaacggagaagaaacc

SEQ ID NO: 240411 - RNA, 73 nt, Homo sapiens
ccagaacagaagagccaccagaagcagaccagggccagagcaccagaccagcagaggagcgccgccaggcgag

SEQ ID NO: 240412 - RNA, 75 nt, Homo sapiens
ccagagcccaaggaggaagggacaaaggaggaagagcgaaaaccacgagcaaggacgccagcgccaaacgaagga

SEQ ID NO: 240413 - RNA, 76 nt, Homo sapiens
cggcacccccaggaagcgcggggaagggacccagaagcagacggagaccagcaagcccaacacacagacaggccca

SEQ ID NO: 240414 - RNA, 68 nt, Homo sapiens
gaaacacccaggagccagggaagacgagacgccaagaaacaaccgcacaacgggccaccaaggaaaag

SEQ ID NO: 240415 - RNA, 69 nt, Homo sapiens
gggacacaccccaggaaaaagacagcccgcagcacgaccagcaggaacggaaagcgacacagaacagaa

SEQ ID NO: 240416 - RNA, 76 nt, Homo sapiens
ggccgggcaggagggagagaggagcacccggagcagccgggagaagaaaaacccgcagcaggaacagaacaggccg

SEQ ID NO: 240417 - RNA, 73 nt, Homo sapiens
gacagcccgccccccagaggcaggcccagccagaaaggaggcccacagccgaccgagcggggcaggacacgga

SEQ ID NO: 240418 - RNA, 81 nt, Homo sapiens
gccccccagccgaccacgaggacacgacaacaccccaaaagccgaccgggccaaggagacaggcccggagacgagaagcgc

SEQ ID NO: 240419 - RNA, 79 nt, Homo sapiens
cgcgggagcggcggcgaacagcgcgacacaggagcgaagaaacaggggagaaaccccgcggggaagccgaggaaagcaa

SEQ ID NO: 240420 - RNA, 37 nt, Homo sapiens
ccaagcagcaaaggagagcccaacgagacaaaaggca

SEQ ID NO: 240421 - RNA, 56 nt, Homo sapiens
aggagccggggcgcccaagggcaagaaagccccacaccgggcccggggggaggccg

SEQ ID NO: 240422 - RNA, 55 nt, Homo sapiens
gaacaggcgaagagcacacaagagaggaggaccggaggcgaccaaagagccgccc

SEQ ID NO: 240423 - RNA, 58 nt, Homo sapiens
cgcacacagcaagcacgagggcaagacggagagaaacagcaaagcagaaacaagcagg

SEQ ID NO: 240424 - RNA, 71 nt, Homo sapiens
ccaagaagacaaagcagcagaggagagagaccgagaaaggcaccccgagccggcgacccggcagccccaga

SEQ ID NO: 240425 - RNA, 85 nt, Homo sapiens
gaagccccgggagcaccgagaagcggagaaggccaccagcccccgggccaagagcagcacggagacagagccacacaccggggcg

SEQ ID NO: 240426 - RNA, 87 nt, Homo sapiens
gaaacggggcccgcgccgcgcgccggcggcaccagaagcagcggaggaagaaacgaaggaggcccaaccacaaaaggagccgacgga

SEQ ID NO: 240427 - RNA, 73 nt, Homo sapiens
gggaagaccgcgcccgcggagagcccaaacaccaccaccaaggcagaggggaggagacacgaagcgacgcaga

SEQ ID NO: 240428 - RNA, 78 nt, Homo sapiens
caaggcccacgggacggcgccagcaaagcacggacagagaaggaggagaagcgagccaggccagcaacaggcgggccc

SEQ ID NO: 240429 - RNA, 90 nt, Homo sapiens
aacacagcaagaaaccgcccccagaacacaacagggcaaaggccccgacaggggcaaggagccacaagccacgacccagaaggcagcggg

SEQ ID NO: 240430 - RNA, 61 nt, Homo sapiens
agcaaccaaggaacaagagagcaagaggacgagaaccaagcacacgaccagacggcacaga

SEQ ID NO: 240431 - RNA, 80 nt, Homo sapiens
cggcggcgggggcaccagcaggagacaccggcgcggcggacaccgaccagaaccggacggcacggaaaggggcaaggcgg

SEQ ID NO: 240432 - RNA, 69 nt, Homo sapiens
gagaacaaaggagagaggaccacccagaggagcaacgcagaaggacccacggcagagacggagaccgac

SEQ ID NO: 240433 - RNA, 72 nt, Homo sapiens
gccgcacaccaccgcgcgcggcgggacggaccgggccaaccggggccgcaacagcccaggacccgacgagga

SEQ ID NO: 240434 - RNA, 79 nt, Homo sapiens
aacccggaaggaccgcgccgcagaggacgaagcgaggagagaaccagaggaaaaaaggagcagaaggaccggggaaaca

SEQ ID NO: 240435 - RNA, 75 nt, Homo sapiens
cccaggccggggccaacgggaaaccgacacagaagaacgcagcccggggagcagcaccccacaggcacgccaacc

SEQ ID NO: 240436 - RNA, 82 nt, Homo sapiens
gggaacaccaaggggcaacgggccagagagggaaggaaacaagccaggaccagccaaggaagcaacacagcagcgagagaag

SEQ ID NO: 240437 - RNA, 83 nt, Homo sapiens
gggagagagcccgcagagcgcgcacccagcagcaacagaaacgaaggaggcccaaccacaaaaggagccgacggaacccagac

SEQ ID NO: 240438 - RNA, 74 nt, Homo sapiens
ccgggccaagcgcccgaggaacggcgcgccaacccaggcccaggccgcggggggcagacaaccacgcgcggcaa

SEQ ID NO: 240439 - RNA, 79 nt, Homo sapiens
cagccaggacacagccagaagcggagggaccgacagcccccaggaaggaggcggcggccgcgagagcccagccgccggg

SEQ ID NO: 240440 - RNA, 93 nt, Homo sapiens
gcgaagcacgagcagaccggcccgaccgcccacagacccaaacaaagagagaacacgaaggcgagccgcgaccaccgcgccccaagccccaca

SEQ ID NO: 240441 - RNA, 74 nt, Homo sapiens
gagaccccccaggacaacagcacacgcacccaagcgcggacagcagcagcacagcaaagaacccaggcccaaag

SEQ ID NO: 240442 - RNA, 75 nt, Homo sapiens
caggcccgagggccccccggggccccccgggcaagaagaaaggagccaaagcacggcgagcacaaagaaaagacc

SEQ ID NO: 240443 - RNA, 72 nt, Homo sapiens
gaaaaggaggaaaagaagagaagagaggccaacacagcgggccacacccaaaaccggacaggcagggcaaga

SEQ ID NO: 240444 - RNA, 61 nt, Homo sapiens
cgcgcagaaccagaccgggagcacgcacccacgaggggcggagaacggaaaagcaccagga

SEQ ID NO: 240445 - RNA, 57 nt, Homo sapiens
ggacagaggaccacaaaccagagagggacgaccgacgaagacaccacgcagacaggg

SEQ ID NO: 240446 - RNA, 75 nt, Homo sapiens
aggcgaccaaccgagcagggacagaagaccaagaagcaaaacagacgaggacgcgcacaggaaaggacgcggaac

SEQ ID NO: 240447 - RNA, 71 nt, Homo sapiens
cgaaaacggggagagccggaccccagcccccgcagggggagcccgccacgaaaggcgggagcgaggcaagg

SEQ ID NO: 240448 - RNA, 74 nt, Homo sapiens
acaccccacaggaccccagagcgacagcccgggacaccaagaaagaacgaccaaaaacgggaagagaggaaacc

SEQ ID NO: 240449 - RNA, 69 nt, Homo sapiens
aggaagcagggagagagagcacggagacacacagcgaagaaaagcaaacacgaggaacggcaacgaaaa

SEQ ID NO: 240450 - RNA, 36 nt, Homo sapiens
gcacccgggacggaaccgcagaaggaacgagggagc

SEQ ID NO: 240451 - RNA, 64 nt, Homo sapiens
aggcacaccaggcaggagcagccgaaggcgacagcacgaaaccagggccaagccgcccgccaac

SEQ ID NO: 240452 - RNA, 83 nt, Homo sapiens
caagaggcaaaggggaggacgcagcaaaccaccagaaggcaccagcccagccacagccagcccagacccagaggaagaaaaag

SEQ ID NO: 240453 - RNA, 70 nt, Homo sapiens
ggccaagcacaaagagcgccccacgagagaacggcacacgcgagcgagcgggcgcgcgcggaacgaaagc

SEQ ID NO: 240454 - RNA, 74 nt, Homo sapiens
cagaccgagaagcaccgccagcaacagccccgagcaggcgagaacgaaagaaaacgacccagccaaccccggag

SEQ ID NO: 240455 - RNA, 112 nt, Homo sapiens
aaaggccagagcaggacacaggggcccgcacgagccaaaggacacagcaacacccgaaaggcggagaagacagcgagaccgcgcaggccaccccggccgccgcagccccgag

SEQ ID NO: 240456 - RNA, 70 nt, Homo sapiens
acggaagaacaggcacagggcgcacacgggaggagcaggcagagagcgcgacaaggaccagagccaggaa

SEQ ID NO: 240457 - RNA, 78 nt, Homo sapiens
gcccagacacgcccgcagagagagggggcgggagaagaagacagcaagagagccagcaggggggacacagcaccaggg

SEQ ID NO: 240458 - RNA, 75 nt, Homo sapiens
aaacaccaccaccggggccaaacacccacaccgggggcacgggccacagcgggcgccacccagggacgggccacc

SEQ ID NO: 240459 - RNA, 85 nt, Homo sapiens
ccagggagggaacaaagcccacagcaccggaaccagccaagaaccacggccacaccccaacacaaccagaggccacaacaggccc

SEQ ID NO: 240460 - RNA, 78 nt, Homo sapiens
gggggcgagcccgaaacgaggcgggagcagcacagagagaagggagaccgagccaggccaggagagaagaaccgcaga

SEQ ID NO: 240461 - RNA, 70 nt, Homo sapiens
aaggcaacagcagccgcaaaaacaaggcggaaacaacgggcaagggaaaggagaccaggaagcaccccgg

SEQ ID NO: 240462 - RNA, 85 nt, Homo sapiens
aaaaccaggcccggaaaaaacagcccagacaagcaccccgcccagaagaggcgggaggcggcagaagcagccagaggagggcaca

SEQ ID NO: 240463 - RNA, 74 nt, Homo sapiens
aaaaacaaggagagcccagcaacggacccaacagagcacgcaaaggacaggaaagcagagaaaggaaagaagaa

SEQ ID NO: 240464 - RNA, 48 nt, Homo sapiens
acgaagcgggcggcgaagagacagcgccgcgcaagagcaggagggaca

SEQ ID NO: 240465 - RNA, 81 nt, Homo sapiens
cgcggaagccccgaggcagccccgcggaggagcagaagaaccacagaaggaacagcaagaaaggacagaaagagcccgcag

SEQ ID NO: 240466 - RNA, 67 nt, Homo sapiens
aaccacaacaaggaagcagagcaaccaacaaacgggaaggaacaagcagggcgcccccagcggagcg

SEQ ID NO: 240467 - RNA, 73 nt, Homo sapiens
caacgacgcgcaaaaaccaagccggggggggcacagagccccggaagacagcccccagcgaccagacccaggg

SEQ ID NO: 240468 - RNA, 83 nt, Homo sapiens
ccggaagcaccccggcggccgcggaagcggggcgcacaccaccggacaaccgacaaaagaaaccaacaggaaacaggaggaaa

SEQ ID NO: 240469 - RNA, 63 nt, Homo sapiens
aggacacccggcaacaaggaaaggacggcgagaagcaaccgggcagggaaggggagaaagagg

SEQ ID NO: 240470 - RNA, 76 nt, Homo sapiens
ccgagagccgcccgggccagcggccgcgcacccccggccggaggcaccagcggagaagcccaccacgcaacgggac

SEQ ID NO: 240471 - RNA, 97 nt, Homo sapiens
ccggagaagggcgcgggagggggccggcgcccgcggcagaagccaaggcgcgagaaggcaccggggcaaacggcacacgaagcacggaacacccgga

SEQ ID NO: 240472 - RNA, 72 nt, Homo sapiens
gaagacgacgcaccgcaggcagacaaaagggccaaagaagggagagagaaccaggagcgcggagacaaccaa

SEQ ID NO: 240473 - RNA, 73 nt, Homo sapiens
gagacgagagagcgcgcgagcggccagcacaagggagggccgaacaggggggaacgacaaacaaggccccaga

SEQ ID NO: 240474 - RNA, 70 nt, Homo sapiens
cggaccgaaggcgcaagagggaggcgcacacacagacaggaagggaaggggcggagacgggcggaacgca

SEQ ID NO: 240475 - RNA, 77 nt, Homo sapiens
agccccgaagagcgggacacagcaagaagcacgaggggagccagaagaaaagagacggaaaaagcaaaggaaacagc

SEQ ID NO: 240476 - RNA, 76 nt, Homo sapiens
gaagaagaaggagcacaggggagggcccccagccccacaagagaccgaagggagcgaaacccagcccccacacaaa

SEQ ID NO: 240477 - RNA, 71 nt, Homo sapiens
acggcgcgcccgcgcacagagcaacaaccgggccacaagagaaagagcacgaacaggacaaagggaaccgg

SEQ ID NO: 240478 - RNA, 72 nt, Homo sapiens
gcagaaacggaagaaggaacagaaaaaaaccaccacagcacacacagaagagccaggcagagaccaaccgag

SEQ ID NO: 240479 - RNA, 77 nt, Homo sapiens
gggaaaggcgagaagagcgccggagaaaccaaaaaaccaaggacgacgggaaaccggacccgcaaagaggaaacaaa

SEQ ID NO: 240480 - RNA, 80 nt, Homo sapiens
gccgaggagccgcaggggggcgaaaggcggcagccccccggggccccgcgacggaaggaaaaggacaggaggacccagac

SEQ ID NO: 240481 - RNA, 86 nt, Homo sapiens
ggaagcagaagaaaaggagaaggaaagcgaaggggaaggcgccgaagaggacgaagggaaccacccccgaagcacggcgcacaagg

SEQ ID NO: 240482 - RNA, 75 nt, Homo sapiens
ggcggccgaacgaggcgagaacgcgcagaccggggagggaaagaaagcacgggaccccaaccaggacgcaggcga

SEQ ID NO: 240483 - RNA, 66 nt, Homo sapiens
gggaggggagcccgcgcccgccgcgggagagaggacccccccccccccccaagacaggaaagggcc

SEQ ID NO: 240484 - RNA, 69 nt, Homo sapiens
caagccaagcaggacaaggaaggaaacccaagacggcggcaggccgaccgccaaaggaacccaccagac

SEQ ID NO: 240485 - RNA, 87 nt, Homo sapiens
cggcacgaggggcccgccaccacgcacgggcgcacggaggacgggaaaaccagcagcaggaaccgggaccaaagaagagaacagcag

SEQ ID NO: 240486 - RNA, 103 nt, Homo sapiens
caccgaagacacaccccacaggaccccagagcgacagcccgggacaccaagaaagaacaacagacaacccagcaacagacggaacagcgcgaggcaagaacag

SEQ ID NO: 240487 - RNA, 66 nt, Homo sapiens
aacgcagaccagcccaggaaggaggcacaaagagagacggaacgcagaaagaccacaagggagaga

SEQ ID NO: 240488 - RNA, 78 nt, Homo sapiens
ccaggcagaccggggacaacaaagcgcgggaacaaagcagcccaggcagaccccaggcgcacaaggcacgcagaagga

SEQ ID NO: 240489 - RNA, 40 nt, Homo sapiens
cgggaaaggaaagaagaagccagacggaacagcgacgaac

SEQ ID NO: 240490 - RNA, 41 nt, Homo sapiens
gaccaccacagaaggaagaagagcccccgagaagccacgcc

SEQ ID NO: 240491 - RNA, 75 nt, Homo sapiens
gggcccgccagccaccgcacaggaggcggacccgacgaagaccaggcaggcccacagcgccacagaaccgcccaa

SEQ ID NO: 240492 - RNA, 74 nt, Homo sapiens
cggacacgaggagaaacagcagaaacgcaccaggccaaagaaagagaaggagacaacaagaaacaggagaaggg

SEQ ID NO: 240493 - RNA, 78 nt, Homo sapiens
gagagggagccgcagcgagcaggaagaaagccgaaaaagaagcgaagcaagaaaagaccagcacgcagcgcgaaggag

SEQ ID NO: 240494 - RNA, 88 nt, Homo sapiens
gcccagcccagcccgaccggagagcggagcgcgagcaggacccgcggcgcccccagcagagccgcagagcacacaacagaccgaaggg

SEQ ID NO: 240495 - RNA, 69 nt, Homo sapiens
gaaagaccagggagcaacgggaggaggcaggcagaaagagggaggaaaagagaaccacaaggaaaaggg

SEQ ID NO: 240496 - RNA, 68 nt, Homo sapiens
cacaagccgaaagagacggagaaggggcacaaggaagaaaaggagaacaggcgcagggagcaggagaa

SEQ ID NO: 240497 - RNA, 68 nt, Homo sapiens
ggcgccaccagcaaccagagggccagagggaaggacagaggaagacggggcccaaagaggaaggggga

SEQ ID NO: 240498 - RNA, 49 nt, Homo sapiens
caaagggacaaagaacaaaaaaagggcaaagaaccaccacaaggcgccc

SEQ ID NO: 240499 - RNA, 79 nt, Homo sapiens
gcagcccgagcgacccaggccccacccggcaggaacccaagccccacaggagcggaagaagaacacacgcagacacccc

SEQ ID NO: 240500 - RNA, 74 nt, Homo sapiens
acagaaagaaaagccgaaagagcggaggcccacccgacgcggagcgaccggcacgggcggccgacaccaccgga

SEQ ID NO: 240501 - RNA, 79 nt, Homo sapiens
gggaaaccaccagacgaggaagggggacaccagcagcaaagaccagacaccaaaggaagcgggccaaaagaaagcagag

SEQ ID NO: 240502 - RNA, 82 nt, Homo sapiens
gcaagaaacgaagcaaaagacagcgaggagcagcagcagcccagcaggcgcggcccgccaggaacgcgaagggaagaaaaaa

SEQ ID NO: 240503 - RNA, 70 nt, Homo sapiens
cggcaccaccgcgaggccagaccccaaagacagacgcggaagccgcagaaggaccggccagaagcaagcc

SEQ ID NO: 240504 - RNA, 65 nt, Homo sapiens
cgggcagaagcgaagcgggacagaacagccaccaaaacagaaggccacaggaaggagaaaggaag

SEQ ID NO: 240505 - RNA, 77 nt, Homo sapiens
ccggcccagccggcagacccccagcagagccaccggaaaccaaaggaggaaaccaccacggacccaaggcggaggcc

SEQ ID NO: 240506 - RNA, 59 nt, Homo sapiens
agaccacaccggaagaagaaacagccagggccccgaacccagccaaagaagaaggacga

SEQ ID NO: 240507 - RNA, 68 nt, Homo sapiens
acaagaaagagagcaaacacgcacgcaaaagggacacagaagagcaacacagcgagcagcaccgggca

SEQ ID NO: 240508 - RNA, 82 nt, Homo sapiens
gggacgcacggcccggggggagacagccacgggaagccaccaggagagaacgccgcgccgcgcgacaacggcccggcaggca

SEQ ID NO: 240509 - RNA, 77 nt, Homo sapiens
gaagaggcccgacagagagccaccacaggaagcgcggaaggcgaggagagcaggaaagaggcaaacgcgccagcagc

SEQ ID NO: 240510 - RNA, 72 nt, Homo sapiens
agggcggaaggacaacagcccgacaaccaggacggcacgggaaacacgagaccggcgcagcagagcagaaac

SEQ ID NO: 240511 - RNA, 70 nt, Homo sapiens
gcacgagcgaaggggaagaaaaggagggagccacagaacccgagaacccggaagaaccagggggaaggcc

SEQ ID NO: 240512 - RNA, 83 nt, Homo sapiens
gacgcgcggaggaaacacccaggacacggccacaacaccaagagaacggcggccaaagcgccagacaagggccgagccccgga

SEQ ID NO: 240513 - RNA, 78 nt, Homo sapiens
caaaaggaagaaccgcggggggaccaaaacaggagcagaacggaccagaccacggagagaggcgggagccgagcaccc

SEQ ID NO: 240514 - RNA, 74 nt, Homo sapiens
cggcacggccagcggcaccacccccagcaccaccccagccccgcgcccgggggcagcggcaagcaggggagcca

SEQ ID NO: 240515 - RNA, 51 nt, Homo sapiens
ccacgaaggccaggccagggaggaacagcgccgaagccaagaagcgcacag

SEQ ID NO: 240516 - RNA, 38 nt, Homo sapiens
aaacagcagggacggaaaggggggccacgggccccgac

SEQ ID NO: 240517 - RNA, 76 nt, Homo sapiens
gggcgcccgcggcgaggagccgcgcgggagacagcgcagccaagaggaaggacgcaaaaggcacgacaggccgccc

SEQ ID NO: 240518 - RNA, 76 nt, Homo sapiens
ccgaaaagaagagaaaccagcgcggggaagaagacacacaacagccgaaggaggacgagcaagacgccacacgcca

SEQ ID NO: 240519 - RNA, 59 nt, Homo sapiens
gccaagccaccgagacccggaggaggcgaagcgagaggacagaggacgaaagcaaggag

SEQ ID NO: 240520 - RNA, 83 nt, Homo sapiens
gggacagggaaagaagagcacccacagaaaacagggggcaaagcagaagaacacgagaagcaaagaagcacgggaaaggggcc

SEQ ID NO: 240521 - RNA, 78 nt, Homo sapiens
ccaacgagccagagcaaaaccagcccagagaacaagaggagggagccgacagcccgcaagacaagacaaaacgggccc

SEQ ID NO: 240522 - RNA, 88 nt, Homo sapiens
ccacgaacggaaccgcacgacacgcagcccgccgccgacgaccacgccccggaccccgcggccagagccaaaacggacaagccaaggc

SEQ ID NO: 240523 - RNA, 69 nt, Homo sapiens
gaagagaaaaaggcaccgcaaggaaaaagaagagcacaagaccagcagacgaccacagcaaccccaaac

SEQ ID NO: 240524 - RNA, 71 nt, Homo sapiens
gaccaccacaacgccgcggacgaccgcacgggcagaaaaccgagaaagggggcagcaaggcccagccccca

SEQ ID NO: 240525 - RNA, 71 nt, Homo sapiens
ccaaacaccaccaccaagggccggagccagcggaggagaccgcacagggcaggacacggggcccccggccg

SEQ ID NO: 240526 - RNA, 57 nt, Homo sapiens
aggccggagcgcgccgacccgaggagaaccagcggagaggaagagaagagacagagc

SEQ ID NO: 240527 - RNA, 75 nt, Homo sapiens
gaccacccagagacagccaacagcccgccacagccagccggccccaaccaaggcgggccgcagagagcaccggag

SEQ ID NO: 240528 - RNA, 72 nt, Homo sapiens
aaaaggccaggagagggagccacacccacgggaccgacgcccagagcggagcagcagggagccaccaagcca

SEQ ID NO: 240529 - RNA, 76 nt, Homo sapiens
gagaagcgaacaaaaaaaaccccaaagaacccgacggagaaggaagcgccggccaaacgagcacagcaaacgcgaa

SEQ ID NO: 240530 - RNA, 53 nt, Homo sapiens
aagcaacaccaacgaacgaacaggaccagccgaaacaagaaaacgaaaaaccc

SEQ ID NO: 240531 - RNA, 62 nt, Homo sapiens
aagaggaaccccggaacacagaaggcgaaggaggggaggagaccacgagggcagccccaggc

SEQ ID NO: 240532 - RNA, 95 nt, Homo sapiens
cgccgaccccccggcgccgcgccggcggcgaacaccagcaggaaaaaagagcggcagaaggccaaacggccgagcaggcgagcgaagagacaggc

SEQ ID NO: 240533 - RNA, 79 nt, Homo sapiens
ggggaagcgcaaaaacaagacggggcgccccacagaggggcgacggacaaggacacaccagcacacacccagcgccccg

SEQ ID NO: 240534 - RNA, 70 nt, Homo sapiens
agacggcacaggaagacaaggcagacagcagccagaaacgaccgagaaggaccacgcagccagggacaag

SEQ ID NO: 240535 - RNA, 67 nt, Homo sapiens
ccgacgccaggcagcgcccccaaacgggagaacacagagcagaaaaccaggacacgcaggggagaac

SEQ ID NO: 240536 - RNA, 80 nt, Homo sapiens
ccaggcccaagcaacaagccaaacggagacaggaaacccagcggcggcagaaccagccggcacaaagccgaaccagagag

SEQ ID NO: 240537 - RNA, 61 nt, Homo sapiens
cagcacagcagcgcgagacagggcgagaaggagggagcagagaagagaaaaggaaaagaaa

SEQ ID NO: 240538 - RNA, 66 nt, Homo sapiens
aagaaagcgcaggcaggcagggaacacacaagagacggaagcagaaagaaaaccgagaacaggggg

SEQ ID NO: 240539 - RNA, 71 nt, Homo sapiens
cccacgcacagcagaagccgaacggccgaagaaagaagcaggacacgagcgcagcaacaaacagccggcga

SEQ ID NO: 240540 - RNA, 79 nt, Homo sapiens
gacgaggcggaacaccgcacagagcagccggacgccccgaccaaggaaaagggccagggacgaagccccgggcccggac

SEQ ID NO: 240541 - RNA, 101 nt, Homo sapiens
cgccacgccagcacgccaacccggacggacaacaccggggagcgcgggcaagccaccgagaaagggaggaccacaacaacaaacaggcggagccgaagaga

SEQ ID NO: 240542 - RNA, 80 nt, Homo sapiens
gcgccggaccgcaggacgacagaccgagggaggacaccggaccccggacgcgggaaagaccccaagaagaagcggaagag

SEQ ID NO: 240543 - RNA, 64 nt, Homo sapiens
caaccggccaaggacaaaccgcaccagcacggggccaaaaaggcacgagggaacgggaaagaac

SEQ ID NO: 240544 - RNA, 80 nt, Homo sapiens
gcaaaagaaggggcacggccaagaagcccggcaaaacgcgccggcgaggaggccgccaggcacagagaaggcaaacggga

SEQ ID NO: 240545 - RNA, 56 nt, Homo sapiens
ggagaggaagaggccccacaggaacaagacagacaagaaaagccaaaaacaaggcc

SEQ ID NO: 240546 - RNA, 71 nt, Homo sapiens
cggaaaaagcggaaaaagggagggacaagagcagcaccaagcgcagaagccagaggacaacagagcaacca

SEQ ID NO: 240547 - RNA, 79 nt, Homo sapiens
ggacccgcgccgcgcccccggcccgcgggcggcccacggcgagaacagagaacgaggaagaaaaggaaacccaaaaaga

SEQ ID NO: 240548 - RNA, 70 nt, Homo sapiens
aaagcgaaaaacgcgccaagcgaaagacagaggcccagccgaaagaggggaggcacgacgacagaaggga

SEQ ID NO: 240549 - RNA, 43 nt, Homo sapiens
ggaccacaaaccgcgccagaaaacgagagaggaacgaggggca

SEQ ID NO: 240550 - RNA, 49 nt, Homo sapiens
gagagcgggcccaccacgccggggcgcggggggccaccaacacccccgg

SEQ ID NO: 240551 - RNA, 73 nt, Homo sapiens
gcacaacaacaggaacccagacagcgcggagcacagccaaggaaaaaagccgaaaacagcagacagagaagaa

SEQ ID NO: 240552 - RNA, 67 nt, Homo sapiens
gcgcaagagaaggcaccaagaggagcagccgcaacagcgcaccgacacaagcccagaagccccaccc

SEQ ID NO: 240553 - RNA, 65 nt, Homo sapiens
aacacgacggagaaaaacggagggagaaaaagcaagaggaaagcagcagcgagacaggaaacagg

SEQ ID NO: 240554 - RNA, 74 nt, Homo sapiens
agccggacagccggcggaaagagccgcagacgcacagcaaccaccggacccgaaggccaccacccagaggggcc

SEQ ID NO: 240555 - RNA, 80 nt, Homo sapiens
ccgcggcgccgagggaccaggccgacccgcggagacagacaagacaagaccggcggggaagcgcggcaccgacgaagccg

SEQ ID NO: 240556 - RNA, 80 nt, Homo sapiens
gagagacagggacaagggggagccggcaaaacaccagaggcccacgccaaaaagggaaaaaagagagccacgacgaaagc

SEQ ID NO: 240557 - RNA, 72 nt, Homo sapiens
ggaaagacaagaaaaagagacaaacacgggaggaagagagaacggcacgaaaggcccaagccaaggagccca

SEQ ID NO: 240558 - RNA, 76 nt, Homo sapiens
acagggggacaagggacggaggccgcaacaaggaagggcacggagaagagggccccaaggcggcagccccgaccga

SEQ ID NO: 240559 - RNA, 73 nt, Homo sapiens
ggaacaagcaagagcgagaaaggagccaggcccgaaaagaaagcgaacacacaaaacaagaaaaggcacgcaa

SEQ ID NO: 240560 - RNA, 65 nt, Homo sapiens
aggaacacgggaagcaggagcgaaagcgccggaagggcaaaacccgcgggagaaaacacaaggca

SEQ ID NO: 240561 - RNA, 58 nt, Homo sapiens
cccaaccgaaaacggaccagaacccacaacaaccgagagaagaacaaacaccacacca

SEQ ID NO: 240562 - RNA, 61 nt, Homo sapiens
caggcgcagacacccagcgaccaagacaaacagaccccagaaagaagaagaggaaagcccg

SEQ ID NO: 240563 - RNA, 81 nt, Homo sapiens
aaagagacccgcagagccacagggcagcgcaccaccaccgccggcgagcaccaggagagcccccaggccgcacccggcaac

SEQ ID NO: 240564 - RNA, 49 nt, Homo sapiens
ccgaggcaagacgagagcagcacaaagcaagcaaccaccgaaacgggcg

SEQ ID NO: 240565 - RNA, 72 nt, Homo sapiens
gcagggcacgggccgaggcggccggggaagggagcggagacgaaagggggcgaacagcgaccagagggcacc

SEQ ID NO: 240566 - RNA, 73 nt, Homo sapiens
gcagaccagcccaccagacagagaagacgccgggaagccacaagaaggagagacgcagagccagacaagacca

SEQ ID NO: 240567 - RNA, 43 nt, Homo sapiens
agcaaccagcagcaccgagagggaagcagagagcaaccaagca

SEQ ID NO: 240568 - RNA, 61 nt, Homo sapiens
gaggaggccacacagaaggacggcccgacggaagggagagaccacggggcaggcccgacgc

SEQ ID NO: 240569 - RNA, 80 nt, Homo sapiens
cagccaggaggccgccccaccggccccacagaagcaggaggaggggcaggagcaaccaaagacaagggagcggagacccc

SEQ ID NO: 240570 - RNA, 78 nt, Homo sapiens
gcccacgcggagacagaccaagaagacccaaagcccggaccggccggacagaaacggaacacaaccgcaggcggccca

SEQ ID NO: 240571 - RNA, 51 nt, Homo sapiens
gccggaggagggcgccggggcggacaacggcaagcggagaagagcaaggcc

SEQ ID NO: 240572 - RNA, 83 nt, Homo sapiens
cgccggcccgcccccgcagcagcgccaggccaagcgcccgaccgggaggggacgggagaagggaccacccgagcacagacgca

SEQ ID NO: 240573 - RNA, 78 nt, Homo sapiens
ccggccgcccagccaggacgcgcccggagaaggaagggccgggccggggcacgggcccacggccccccaccgggccac

SEQ ID NO: 240574 - RNA, 70 nt, Homo sapiens
ccacgaaagcggaggacgaaacaaggacacgggaaaagaggaaacaggcaccaaaagacccaacagggcg

SEQ ID NO: 240575 - RNA, 63 nt, Homo sapiens
caccaggcggagggcggcagcccagacgggcgggcagggccgggcccgcaggcagcggcggcc

SEQ ID NO: 240576 - RNA, 77 nt, Homo sapiens
aggagagacgagaggaaaccggaccaggcagacacaccgacgaaaagaaggagaagacgacaccggggaaggggaaa

SEQ ID NO: 240577 - RNA, 73 nt, Homo sapiens
gaaggagacggaacgcacagaggaacgagcgagcggcagagcgagaaacaggcaagaaccaggagaagggagc

SEQ ID NO: 240578 - RNA, 81 nt, Homo sapiens
gggcagacccacgagcaggagcagacaggccgagacgcaccagagccggaccggggacgcgaagcaggcccgggagacgac

SEQ ID NO: 240579 - RNA, 76 nt, Homo sapiens
cggccccgggacagcaaagggagaaccagaaaagcacagcaacccagaagagcccagacagcagccaacacgaaaa

SEQ ID NO: 240580 - RNA, 69 nt, Homo sapiens
gacaaaaagcagccggcacaagacagagagaggagcgcaggaaaaagagcaccggccagcagaaccagc

SEQ ID NO: 240581 - RNA, 65 nt, Homo sapiens
cggacaggccaccgagggaccaggaacaccggggaaccagaacaccaccaccagggaaaagcacg

SEQ ID NO: 240582 - RNA, 61 nt, Homo sapiens
cagacagcggacagaaggggggaacaccgaggccagggggagccgaccggagcggaacccc

SEQ ID NO: 240583 - RNA, 76 nt, Homo sapiens
cgcggcgcggccccgacccccgcccggcgccggcccgggccgccagggcagacaacaggcacaaagagagaaggaa

SEQ ID NO: 240584 - RNA, 61 nt, Homo sapiens
gaaaggacagagagaaccagcagcaaagcaaccaggcgaagccaggaaaaaacaggggaag

SEQ ID NO: 240585 - RNA, 66 nt, Homo sapiens
gaccacaaaccggcggagccacagcaacggggcggcacacaaggagcgaagggcagggagaacgcc

SEQ ID NO: 240586 - RNA, 80 nt, Homo sapiens
ggaagaaaagcggggggaaggccggcgcggaagaggccggcggcgggacggccccacgggacccgccccgaccacagcag

SEQ ID NO: 240587 - RNA, 35 nt, Homo sapiens
gcaagagaaacgccgaaagcccaacaaaggccgga

SEQ ID NO: 240588 - RNA, 69 nt, Homo sapiens
cggggcgccccacagaggggcgacgaaggcagagggggcgagggaggaaagggggcaaaacgacgaaga

SEQ ID NO: 240589 - RNA, 73 nt, Homo sapiens
ggcaccgggcccccgcccgcagccagcccgggcaacccaggcggggcgcacagggggagcggaagggcccccc

SEQ ID NO: 240590 - RNA, 81 nt, Homo sapiens
gcacgacacagaaggggaggggagggaaaggcccaggaaaaagaggaccagggccagggggcagccgcaagggggcaccca

SEQ ID NO: 240591 - RNA, 64 nt, Homo sapiens
aggaagagggggcacccagcacacccaagacgcggcaacaggagaaagacagcaaagaaaagga

SEQ ID NO: 240592 - RNA, 79 nt, Homo sapiens
cgcccgccggcacgccgccagccccgggggccacgagcggaaaagcgacaccaagcagggacgaaaaccagacagacgg

SEQ ID NO: 240593 - RNA, 82 nt, Homo sapiens
acccggggccgccgcgcaggagcccccggagcggacaccccgggccaagaggacaacaagaagcgccggccacgccacacca

SEQ ID NO: 240594 - RNA, 77 nt, Homo sapiens
gagaaacaccgggcgggccccgggcgagcggggacgccgaacggaacaaggaacagcaccacaacaggaaggaaccc

SEQ ID NO: 240595 - RNA, 75 nt, Homo sapiens
agaaacagagagaaaagagacggagcaagagaacgcaagagacggggagcgacagaaaagcagcacaacccccgg

SEQ ID NO: 240596 - RNA, 69 nt, Homo sapiens
cacgagcaccgcgccggcccagcaccccgagaaccgcaggagccagagggcgcgcgggggcacagccca

SEQ ID NO: 240597 - RNA, 78 nt, Homo sapiens
ggcccgagcagccagcacggagaaacgaaggaggcccaaccacaaaaggagccgacggaacccagacggagaacaaaa

SEQ ID NO: 240598 - RNA, 75 nt, Homo sapiens
caggaaggagccaaagcacaagaagaagacgagcgagcgggcggacaccagaacgaggaaagggaaagccaaccg

SEQ ID NO: 240599 - RNA, 67 nt, Homo sapiens
cgagacgggcggagaggagaagaacagagaaaaggaggccggacaaaaacccacaacgccgcaaaac

SEQ ID NO: 240600 - RNA, 75 nt, Homo sapiens
agagaaacccggagggcgccgggggcggagaacggaaaagcaccaggaagcagagaggaccgcagaagggaagga

SEQ ID NO: 240601 - RNA, 73 nt, Homo sapiens
accaggcacccgcgggagcggccgcaagaacaagacccggcaggagccccaggaccccaaaggaaacgagaga

SEQ ID NO: 240602 - RNA, 80 nt, Homo sapiens
cggccgccggcgcgggagggcccaagaggagaagacggcggcggcgagggggggcgcacgagagaaacagaggacgaccg

SEQ ID NO: 240603 - RNA, 85 nt, Homo sapiens
gccggcccgcgggggagccccgggagccgcacggaaaggaggcccaagaggcgaaacgcaacacggagccgccaccgcccaccaa

SEQ ID NO: 240604 - RNA, 74 nt, Homo sapiens
aagggaggaaaagggcagggacagcgcaggcagcagacgcggcgcgcaacgcaagccccaaccgcgaggagagc

SEQ ID NO: 240605 - RNA, 70 nt, Homo sapiens
gagccacgggccacaagggaccagcaaagagagggccaagaacccggaggagggcagccggacacgcaca

SEQ ID NO: 240606 - RNA, 67 nt, Homo sapiens
aggggagagccgagccaagaggcaaggggacgcggaagagacagcagaacaagagccaggaccggac

SEQ ID NO: 240607 - RNA, 73 nt, Homo sapiens
gaaggcggcgacccagcagaagaagcagaaaacacagagaaaacacggagaaacagcaacaggagaaaagggg

SEQ ID NO: 240608 - RNA, 61 nt, Homo sapiens
ggccaccggcgggaggaacaaaagacagcgcgggagccaggaaacgcagaccccccacgag

SEQ ID NO: 240609 - RNA, 79 nt, Homo sapiens
aaaaagcaagacgacggaaacaacagagaagaggacagcaggcgacacgccaaggaaagaaaacccagaagacacgaga

SEQ ID NO: 240610 - RNA, 78 nt, Homo sapiens
aagccccccggccccgagcccaggccggcgcaggcgacacccgcccacgagagcggaggcaaagaaaccccaaagcca

SEQ ID NO: 240611 - RNA, 78 nt, Homo sapiens
gggacccagggaaggcaacgcacgaaacgagacaagggcggccggaggaggccaacgccgaccggaaggaagaccgga

SEQ ID NO: 240612 - RNA, 63 nt, Homo sapiens
cccggagaagaacccagcgccaaggagagaggggcagaggcccaaccacaaaaccaaacaccc

SEQ ID NO: 240613 - RNA, 65 nt, Homo sapiens
acagagcggggcccaccccgccggaagcaggcaagaagcagcagcaggcagccggcacccgcaca

SEQ ID NO: 240614 - RNA, 77 nt, Homo sapiens
cggagccaaagccggggaaggagccaaagcgaaggccggcacgagcagcggccgcccgccaggccccagaaacaaac

SEQ ID NO: 240615 - RNA, 59 nt, Homo sapiens
agaaaccacggaggagaaacaccccagaacagaaggggcaggcacaggagacacagggc

SEQ ID NO: 240616 - RNA, 72 nt, Homo sapiens
ccagaacagaggaacggggagagccgcaggcgcccaagcaacagagaaacgaacgcaagagggaaagaaaaa

SEQ ID NO: 240617 - RNA, 76 nt, Homo sapiens
cggccgaaggcgaacgccgcggccaaggagccgccaaagccagacgggaacgaagaaggacagaacggacaaggca

SEQ ID NO: 240618 - RNA, 81 nt, Homo sapiens
ggcaccaggagagcccaggcaggaccggcacggcgaaacccacccagaccaggccagagagcacgcagacacgaccgccca

SEQ ID NO: 240619 - RNA, 39 nt, Homo sapiens
cgacccaagcacaccagaaagcaaaagagcaacgccaca

SEQ ID NO: 240620 - RNA, 83 nt, Homo sapiens
cccaccagaaccccaacgggcaacaaggaggaccagaaaacggggacaacacgcagcgaaggaggaggcggaggagaggaaaa

SEQ ID NO: 240621 - RNA, 81 nt, Homo sapiens
gcgcgcgcaaagagccgagcacgcgggcgcacagcgcgacgggcggacggaggaggaccccgggaaaaaaagaagaagcaa

SEQ ID NO: 240622 - RNA, 76 nt, Homo sapiens
aggacccacccagggcagaaaccaggcaggcacacgaagggggcggagcagaaaccagagacagcaccacacagac

SEQ ID NO: 240623 - RNA, 58 nt, Homo sapiens
gacccgggccccacgcgcaggggacagagaaagaccagggcagaggaagaacgcaggg

SEQ ID NO: 240624 - RNA, 79 nt, Homo sapiens
aaggccacgacccacgagacaggggcccaagaaaaagcaccggacgaacaggaaaaagggcaagaagcaccaaaaggaa

SEQ ID NO: 240625 - RNA, 80 nt, Homo sapiens
ccgcccaccagggccaccagcgccccgggaaaaagaaagcggacgccggaagcggagaagaagggcagggccgaccaggc

SEQ ID NO: 240626 - RNA, 71 nt, Homo sapiens
caacccacagacaaacaacaaagaaacgaaggcccaacagggaaggagaagaaccacagacaaagacgaaa

SEQ ID NO: 240627 - RNA, 82 nt, Homo sapiens
gccccaggaacgccgaaacgagcaggcaagagacaggacgacgagaacggcaggagcccagcggacggaggccgcccacaga

SEQ ID NO: 240628 - RNA, 75 nt, Homo sapiens
gaaacaagaaaaaacaaacgagccacagagacaggcggaggaaagaggaagcagaacgaaaccgaggagagcaga

SEQ ID NO: 240629 - RNA, 55 nt, Homo sapiens
cgcggccggagcaggaaccagcacggggggcgggaaaacggcacaaggcgacgag

SEQ ID NO: 240630 - RNA, 44 nt, Homo sapiens
ggagaccggccgggaacagacggggaagggggccgcagggcgcc

SEQ ID NO: 240631 - RNA, 77 nt, Homo sapiens
cggacaagcacagccggaagagcaaggacccagggagagaggaacccaacaagaagaaaaccagcaaagaaaacgaa

SEQ ID NO: 240632 - RNA, 81 nt, Homo sapiens
gcgcacgcgcaagaccgcgaggcgagacccccgccccggggccccgacccgccaaagacccagaaggggagcgcggaccga

SEQ ID NO: 240633 - RNA, 68 nt, Homo sapiens
gcaagagccggaagaaaggaaagaggacacacggaagagagcagccaaccaggggcaccagcgagaaa

SEQ ID NO: 240634 - RNA, 71 nt, Homo sapiens
gaaggccagcaccagaaaaccgggagaaagaaagcccggaagcccccagaggccccgagcggagaaggagc

SEQ ID NO: 240635 - RNA, 73 nt, Homo sapiens
accgaagcgaaaagggccgggccaagcaggacaacgcacaaccaccgcgaacgacggggcgaggacgcaacca

SEQ ID NO: 240636 - RNA, 72 nt, Homo sapiens
aaggaccaagaaccagggagacccaccgacggagcccccccacagaggaccgccagcggggcccccaaaccc

SEQ ID NO: 240637 - RNA, 93 nt, Homo sapiens
gaagacgccgaggaggcagagcaccgcggcgccgagcgcagacccgagagcagaaaaagccaccggagcgaagcgaaggaagcgaggacaaca

SEQ ID NO: 240638 - RNA, 69 nt, Homo sapiens
gccaaaaaaagcaagaacgaggaaccccagagaggacagaagccaaccaggcagcagaggacccgaaaa

SEQ ID NO: 240639 - RNA, 54 nt, Homo sapiens
aaagaagagccacccggagccaggaagcgaggccaagaggccaaagaagcacag

SEQ ID NO: 240640 - RNA, 71 nt, Homo sapiens
agaagcccgacaaacgaaggacgcacacaggacaacagcgcgagccgcaagggagcggccccccgacagcc

SEQ ID NO: 240641 - RNA, 73 nt, Homo sapiens
gcaagaccacagcgcgcggcccccacaccacacagagagcgaggaaaccgccgacgcgcaccccaccgcgcga

SEQ ID NO: 240642 - RNA, 101 nt, Homo sapiens
acaaggacaagcaggaaaacggcgagaggacggagggggcccgacaaagcccccaagagaggaccacagccgggaaaggaacacgcggagcagcggcccgg

SEQ ID NO: 240643 - RNA, 67 nt, Homo sapiens
ccgggcccggggagaagacgcggcggcgagaccaggcacggaccaggaagcccccccccccgacgca

SEQ ID NO: 240644 - RNA, 81 nt, Homo sapiens
cagacgggggacgcagggaggagcgggacaccccggaagcgggaaaggaagggggagcaacagacaagcccgaaaggaaca

SEQ ID NO: 240645 - RNA, 74 nt, Homo sapiens
caaaaggaaacccaccaagccagaggagcagccaagaagccccccaggggcccgcagaccaacaacaagccaca

SEQ ID NO: 240646 - RNA, 81 nt, Homo sapiens
aagagcacaggggaaaaacgagcaccggcgcagggaagaaagaaagacaagcccggagcccgggagacacaaagaagaaac

SEQ ID NO: 240647 - RNA, 82 nt, Homo sapiens
cggccaaagccgcccagacggccaccggcgggaggaacaaaaggaggccacacgagcaccgagagaaccgagccggcgaggg

SEQ ID NO: 240648 - RNA, 73 nt, Homo sapiens
gacacccacccccaccgacgcggggcggcagccccaacgaccacgcaagccaccggaaagacacccggggcgg

SEQ ID NO: 240649 - RNA, 75 nt, Homo sapiens
gcgagcccccgcacccggcaaccgcagagccacgccgcagccggccaccgaaccgagcgaagaccagacgccgga

SEQ ID NO: 240650 - RNA, 44 nt, Homo sapiens
ggaggagcccgaagacagccccgacgcacacaaaagagggacaa

SEQ ID NO: 240651 - RNA, 82 nt, Homo sapiens
cggcaggaaccgggaccgccagcgcaggagacagcgcacgccaggcggaggcagggcacaacacagccacgcagccgacccc

SEQ ID NO: 240652 - RNA, 42 nt, Homo sapiens
accgcccccaacagcccggagaagaccgacaaagcgagccaa

SEQ ID NO: 240653 - RNA, 81 nt, Homo sapiens
gggagcggcgaagccgcgggcgaggaaggagggccccggagcagccacaccaccgaggccccacccagcacgagcacagcc

SEQ ID NO: 240654 - RNA, 47 nt, Homo sapiens
cagaaacacaaagcgccaaaaggaccgaagcgccggccagaccaggc

SEQ ID NO: 240655 - RNA, 74 nt, Homo sapiens
gaagagcgcagaagccggaagagagccaagccaggcccagcagccgccaccgacagaagcagccaaagagaacg

SEQ ID NO: 240656 - RNA, 58 nt, Homo sapiens
cagaccaagaacaaccgcggacacggagaggaaggacccagcggcaagaagcaacaga

SEQ ID NO: 240657 - RNA, 58 nt, Homo sapiens
aacacgagaaccaccccgacacaacaccaccagccaaaacagaagaggcaaagcccag

SEQ ID NO: 240658 - RNA, 41 nt, Homo sapiens
cagcgagggggaggagacggggccaggcccacccacagcca

SEQ ID NO: 240659 - RNA, 66 nt, Homo sapiens
agaccagagcaaaaaaaggcaggaaccgccgcaccgcagaacagggggacaaaccacacagagaca

SEQ ID NO: 240660 - RNA, 75 nt, Homo sapiens
caaccccaacccggagagcggcgaggacccagggcagcacaaaaagaagccagccaacaaacagagacagcacag

SEQ ID NO: 240661 - RNA, 58 nt, Homo sapiens
acaaaagccggagacaacgaagaagcagcaggaggagagagccaggaacaaaagggga

SEQ ID NO: 240662 - RNA, 85 nt, Homo sapiens
caggcccgcaccgacagccaccgccgcccccaacgccagccgaaccaagacacccaggagaaagacagcggggaaaagaaaaagg

SEQ ID NO: 240663 - RNA, 70 nt, Homo sapiens
gagaaggaccgggaagggcggaacgggggacaggaaaggggaccccacccgccggcagagcgcccaccgg

SEQ ID NO: 240664 - RNA, 79 nt, Homo sapiens
aagcgagaagaacacaggcaaagccgggcacaccaccagcaagacgaaggcaagagccacaaggccaacggacaagacc

SEQ ID NO: 240665 - RNA, 65 nt, Homo sapiens
agacacgggagagagaaggacgaggcccaacagagacacagaccagcgcgagagaacaccaagga

SEQ ID NO: 240666 - RNA, 73 nt, Homo sapiens
gacggggagcaaaccccgaaaggagaccccgcgggaccagaaacaccgcgccggcggcaccgccccgcgaccc

SEQ ID NO: 240667 - RNA, 77 nt, Homo sapiens
aggacgcacaacgcacggccggcggaccgcgggacagccgaggaacacccaggcaaggacggggacacaagaccagc

SEQ ID NO: 240668 - RNA, 84 nt, Homo sapiens
ccagaggacgcgggccgaggagagcggaggaggggaccacaggagcagcaacccagccccggaaccacgccaggggaagaaacg

SEQ ID NO: 240669 - RNA, 73 nt, Homo sapiens
aagcagcaacaaagcaaaacaagaacagaggaaggggaccaggggcacaagacccaagcagacgagaggggac

SEQ ID NO: 240670 - RNA, 95 nt, Homo sapiens
ccccagcgccgcgggccgcaggccgcgagcagcggacgccggccgccgcaggaggaacaagcagaaagcacgaacaacgagaacaagacacgagc

SEQ ID NO: 240671 - RNA, 62 nt, Homo sapiens
ggacaccccgccaggcaaaaggccccaggcagagagcccacggccaccaggccacaagggga

SEQ ID NO: 240672 - RNA, 78 nt, Homo sapiens
gcgaagcggacgcagccgcgagcccggaggcggcgggaggaggcggcggccggaaacacgccgcaccagggaggagag

SEQ ID NO: 240673 - RNA, 37 nt, Homo sapiens
gcgcgaccacgacaccgaccacaggcaacacacagga

SEQ ID NO: 240674 - RNA, 79 nt, Homo sapiens
aaggccggacggcccaaagaggagggcgcacagcgcccgaggacaggggaaaaagaaaagggcgaagacccgaagcagc

SEQ ID NO: 240675 - RNA, 72 nt, Homo sapiens
gacacgcccggggagcccagcacagcaggagagacccgggccagaggccaggcaccacaacaagggggcaag

SEQ ID NO: 240676 - RNA, 62 nt, Homo sapiens
aggcgcggaggacgccccaccgccgacgcccccagccaccaggcccgagggaggacggaaca

SEQ ID NO: 240677 - RNA, 82 nt, Homo sapiens
ccacaaagccgccggccagggcaagcgcccgaaggcagagaaccagggccgaaaacccagaagaacggccacccagagacac

SEQ ID NO: 240678 - RNA, 85 nt, Homo sapiens
ccccccgcgacacagccacacacacgaccaccaggaccgcgggacaaggcaagcccggacgggacacagaaggccacggacccac

SEQ ID NO: 240679 - RNA, 78 nt, Homo sapiens
caccgcacccagagaaagcgcggacaacaccaggaaaagacagaggccaacaagccgaggagaggcccacccgccaag

SEQ ID NO: 240680 - RNA, 64 nt, Homo sapiens
ccggaagagagaaccaccccagccggaagccggaccgcccaaggcaaggggacgaaaagcagca

SEQ ID NO: 240681 - RNA, 76 nt, Homo sapiens
cggagcaggagaaagcaaaggcgccgaagcgcacgaccccgacacccccaagccacgaagaccgggcgccagggcc

SEQ ID NO: 240682 - RNA, 57 nt, Homo sapiens
accaccgacagaagcacagcaaggaaacgggcagcccgacagcaaccgcgacaggag

SEQ ID NO: 240683 - RNA, 67 nt, Homo sapiens
ggacgacaggccgggagcggaagaccaccaaaagcaggaaaacgagacggcggaagcgcaagagccc

SEQ ID NO: 240684 - RNA, 76 nt, Homo sapiens
ggcgcgcgagagcaggcaccgaaagggcgggaccgggcccccaacccgggcacccaggcgaggagaaacacaggag

SEQ ID NO: 240685 - RNA, 84 nt, Homo sapiens
cgaggaagacgccgaggccgggccaggaacggcggacggggggcggcagccagccgcaggccaagggaagaagcagaagcaagc

SEQ ID NO: 240686 - RNA, 76 nt, Homo sapiens
gcagggagcccccgccggcccggcggccgaggagaagaggggggcggaagaaagcgagaaccccgaacagaggagc

SEQ ID NO: 240687 - RNA, 77 nt, Homo sapiens
gaagcggcagcgcagcaggcgcaaacaagaccaccggagagaaaaccgcacacacaaagcccccaaggagaaggaag

SEQ ID NO: 240688 - RNA, 68 nt, Homo sapiens
caagcaaaccaacggaacaggaaagcgaagacggaaaaagaaaccaccgagcaggcccgacccggagg

SEQ ID NO: 240689 - RNA, 83 nt, Homo sapiens
cgcaccgccaggcgccccgggcgcggcaaggacgagccggggcgcgaagacccaccgcgcagaaggcaagaccgcaaaggagg

SEQ ID NO: 240690 - RNA, 75 nt, Homo sapiens
gggaacgaggcgccgaccccacaggaagggaagcacagcgacccgcacgcgggagacagggcagccagaacggag

SEQ ID NO: 240691 - RNA, 76 nt, Homo sapiens
aaacagccagcccgaagacgcagcaaggcgcgaggccacagaagaagccccagaccagagaggacaaccaaaagca

SEQ ID NO: 240692 - RNA, 56 nt, Homo sapiens
ggacagcgcacacagcaagcacgaggacccggcgggggcaaggaagcacggaggcc

SEQ ID NO: 240693 - RNA, 69 nt, Homo sapiens
aacgcacccaggggggggacaagaccaggaaagaggggacaaggagcaacacaaagaagggaaccgaga

SEQ ID NO: 240694 - RNA, 75 nt, Homo sapiens
acaaaaacggcccggagaggagggagagcccgaccagagaaaaggcggaagaccgccaaaaaggacacggagcca

SEQ ID NO: 240695 - RNA, 80 nt, Homo sapiens
gagcgcacccagcaagccaggaaggccaagaaaagcaagccagcgccagaaaaaaaccgccagaagggaagaaacaagcc

SEQ ID NO: 240696 - RNA, 81 nt, Homo sapiens
gccgccccgcagccccccgcagcacccagccggccacggccggcgcggaagaggccggcggcgggacggccccacgggacc

SEQ ID NO: 240697 - RNA, 73 nt, Homo sapiens
ccacagccccggggaccagaggagaccgccacacaagagaagacccaccgaggaggagaggcgagccggggcc

SEQ ID NO: 240698 - RNA, 82 nt, Homo sapiens
aaggcaagagaacagcagcgccgcccgccgacagccaggcccgggagaaggacacaggacaaggagccaccggagaggaagc

SEQ ID NO: 240699 - RNA, 79 nt, Homo sapiens
gaccggacccggcccgggagcaaagacaagcagaccggaagaccgacggaagaccacaccccgagggagcccaggacac

SEQ ID NO: 240700 - RNA, 46 nt, Homo sapiens
ggccacaaccaagagaaacaaccgccccgccccacacgggacgcgg

SEQ ID NO: 240701 - RNA, 105 nt, Homo sapiens
accaccaggaagaaaaggaaaacaacaaacaccagcagagacagcacaagagggcagccacccagaggcaaagcgcccacagcccagcccaagccacccgcaacc

SEQ ID NO: 240702 - RNA, 85 nt, Homo sapiens
ccgcgcgcccggccaagaggcaaaggggaggacgcagcaaaccaccagaagaacaccccaccagaccacccagcaagcccacaaa

SEQ ID NO: 240703 - RNA, 56 nt, Homo sapiens
gcccccgccccgcgcgcagacgcacacaaacgaaaggacaacggggaccccgcagg

SEQ ID NO: 240704 - RNA, 30 nt, Homo sapiens
aggcggagcacaggcaaaggcgacgccagg

SEQ ID NO: 240705 - RNA, 75 nt, Homo sapiens
cggccaccgcgacccggccgcgccggcgccgaccccgcgcgccaggggagggagagcacggcgcaccaacggcag

SEQ ID NO: 240706 - RNA, 67 nt, Homo sapiens
cacgaggcgggcagcaccgcaccagagagccaccaccccgaagacgagccacgcccagaaggcagga

SEQ ID NO: 240707 - RNA, 76 nt, Homo sapiens
caagggaggcagcaggcaccgacgcaggcagaacagggccacaccaccgcaggcaacaggaagaagaacccacagg

SEQ ID NO: 240708 - RNA, 66 nt, Homo sapiens
aaaaccagaagagcaaaggcgagagccacaaccgaggacccgaaaaccccgagaggcaaccaaaaa

SEQ ID NO: 240709 - RNA, 82 nt, Homo sapiens
cgagcgggcgcgcgaagaggcggcggccgccggcgggccggggagccaccggggaccgcaaggccgcggggcccaacaaggc

SEQ ID NO: 240710 - RNA, 68 nt, Homo sapiens
gagcaccaccagggaccggcaaagaccagaacaccccagaagcaggaagaaggacaaaggccagccag

SEQ ID NO: 240711 - RNA, 70 nt, Homo sapiens
cccgccggcccagaaggcaccgcgcaccccccggcagggaagagagccagaaaacccagacaagacccca

SEQ ID NO: 240712 - RNA, 73 nt, Homo sapiens
ggcagcgagggcaggagcaccaggcggcgccgagcgcggacggccaggccccgggccaggcgcgcaccgggag

SEQ ID NO: 240713 - RNA, 84 nt, Homo sapiens
ggcgcggcagaaaaaccagcccggcgcagggcaggagaaacccagcgggcccagagacgcagcgggaaaaccaaggcaagccag

SEQ ID NO: 240714 - RNA, 76 nt, Homo sapiens
caaccagcaggggcggacccagaaaaggcggcccagagaaacccaggggagccgccaccaaaagcagacggaaaac

SEQ ID NO: 240715 - RNA, 85 nt, Homo sapiens
agcaccagcaggcaaaacgaggcgcagcggggaagagaaccgagcggccggagcagaaacgagcggaccacggagcccgggaggg

SEQ ID NO: 240716 - RNA, 80 nt, Homo sapiens
cagaagaaagacggcggaccgcgggggagaacaacaggcggaaaccgcgaggaaacaaaaacagcaacgggggcagaagc

SEQ ID NO: 240717 - RNA, 73 nt, Homo sapiens
gagcgccacgcgcggaaggcagcgcccagcagcgcaggaaggcagcaacaaccacccagggagaaaaacaaga

SEQ ID NO: 240718 - RNA, 79 nt, Homo sapiens
gaaacccacgaaccgagaagaccacaggggcagccaggccggggacggaagaagaccaaaggacaaaaaagacggagag

SEQ ID NO: 240719 - RNA, 77 nt, Homo sapiens
cgagacaacacggaccagcaacagcagaaaagcgagaaaagcagaaaaaacacggaacaaaaaagagaagaagagac

SEQ ID NO: 240720 - RNA, 82 nt, Homo sapiens
ggaacaggagagcgcaggagagagaacgggacccagagccccagaaagagccgacccggacgaccggagaaggagccggaac

SEQ ID NO: 240721 - RNA, 80 nt, Homo sapiens
caccacagggacggcggccggacaaacacgcaaggacccccccggccaagggcaagcaaggaccagcagcaggggccagg

SEQ ID NO: 240722 - RNA, 87 nt, Homo sapiens
caccccgcgaggcccccgggcccgggaaaacacacggccagagcgcacagcgaggaggggggcgcgcagcccggggaccccccgccc

SEQ ID NO: 240723 - RNA, 78 nt, Homo sapiens
gggaacagacgcagggcagggccccgcccggcggggaagcggaggcacccaccacgggccaggcgggccagaggcaag

SEQ ID NO: 240724 - RNA, 73 nt, Homo sapiens
agcccacaggagagggcgcagagccgcccgacacacaaacaaaaaaggacccccccgcaagccaaaagccaca

SEQ ID NO: 240725 - RNA, 90 nt, Homo sapiens
gcgggcgagcggcggggagcggcgaagccgcgggcgagccggaaccaaaaagaagccccagagccggggccaggagccccaagcgcccca

SEQ ID NO: 240726 - RNA, 75 nt, Homo sapiens
cggggccaaagcccccgcccccagcacccacccgggggcagggggcccgggacagggaggcgaagcggccacagg

SEQ ID NO: 240727 - RNA, 56 nt, Homo sapiens
aggaaacagaacccaggagaaggagaaaaagagccccaggccccgcaaaccgagag

SEQ ID NO: 240728 - RNA, 51 nt, Homo sapiens
cacaagagagcagggaggagggaaacccagacgacaaggaaggccaaggga

SEQ ID NO: 240729 - RNA, 72 nt, Homo sapiens
gagacagacaaggcaaagcgaaaggcaccgcaacaacgcccagcgagacacaagcgggacggaagaggcccg

SEQ ID NO: 240730 - RNA, 61 nt, Homo sapiens
aaagaccggagcagcaacgcaagacaccggcacgcaacagaccaccaagaggacagacaag

SEQ ID NO: 240731 - RNA, 81 nt, Homo sapiens
aaagcagaagaaaagggacgcaagaaacccaggacgagaacagcaacagcccacaccacgggaggggcacaccgggagcag

SEQ ID NO: 240732 - RNA, 79 nt, Homo sapiens
gacagcaggaaacagaacacgcgccggaaagcagccaagacagagacccgacgccgcccggcacagggcgggcagcccc

SEQ ID NO: 240733 - RNA, 71 nt, Homo sapiens
aagcaccgaggcacaacagcgccccccccaacccaacggcaccaaggaagagagaagggaaaccaaaggag

SEQ ID NO: 240734 - RNA, 55 nt, Homo sapiens
agaaaccaagaacagacggcccagaacgagaaagagaagaacaaaaaacgcgaac

SEQ ID NO: 240735 - RNA, 85 nt, Homo sapiens
ggaacaggcgccggggcccccgcggcgccgggaggaggccggggccgcgcgagggcgcccagcggaaccacacggcggaggcacc

SEQ ID NO: 240736 - RNA, 51 nt, Homo sapiens
acgcagggcgcccccgaccaagggaacggaagccccagcccgcgcgagcca

SEQ ID NO: 240737 - RNA, 54 nt, Homo sapiens
caaacgccacggccggagaagacggggcccggagcagagacgagcggaagagac

SEQ ID NO: 240738 - RNA, 59 nt, Homo sapiens
caaggagggcgaagagcgaggaggccgcgggagagcgggggcgggaggcgggccccggg

SEQ ID NO: 240739 - RNA, 61 nt, Homo sapiens
cagccagcagaggcgcagggccagcagggcccaccagaaaacacgaaggagaagcgcaaag

SEQ ID NO: 240740 - RNA, 76 nt, Homo sapiens
ggaccagaccccgccccaccggagcacggacaccagaagaccagcagggaggagaaagacagcaaagaaaaggaga

SEQ ID NO: 240741 - RNA, 79 nt, Homo sapiens
acggcagcaagcccgcaaacgggacaaaaagaagaaccagcaaaagagagcgcagagaaaaggaagaccagaaagaagc

SEQ ID NO: 240742 - RNA, 37 nt, Homo sapiens
acaccaaagagggacggaaccaggccgggaaaccaaa

SEQ ID NO: 240743 - RNA, 41 nt, Homo sapiens
aacgcaaacccccaggacagggggcagcggcgacgcggagg

SEQ ID NO: 240744 - RNA, 83 nt, Homo sapiens
ccaccccagccccgcgcccgggaacacagccgccagggcgcccaacgcccccgacaggcgcagcaagcagggaggagacgggc

SEQ ID NO: 240745 - RNA, 80 nt, Homo sapiens
ccgggggccccggacgcgcggcggaggggccgcccgcggagccaggccagcaaagaagccggaccgagaaccgaaggagg

SEQ ID NO: 240746 - RNA, 73 nt, Homo sapiens
accccagcgacgcggccagacgaaaaggggaaaggagaaagaagggagaagaaacagagaaccccaaggacaa

SEQ ID NO: 240747 - RNA, 75 nt, Homo sapiens
aaaggagcaaagacaaaggcacagcggagaaggaaagcaaagaagaaagccaaggggcacaccgggccaaacaca

SEQ ID NO: 240748 - RNA, 78 nt, Homo sapiens
cggaccagcaaggggaaccacggaagacgcccaccaacgccgaacagcaacagggggcaaagccgccaacagggcagc

SEQ ID NO: 240749 - RNA, 70 nt, Homo sapiens
caaaccaaccggggacgcagaccacagccagcaggaagagaccccggagcccaccgagaccagaacggaa

SEQ ID NO: 240750 - RNA, 45 nt, Homo sapiens
cacacgacagggagcccagaagggccgacgccaccgccgagccca

SEQ ID NO: 240751 - RNA, 40 nt, Homo sapiens
cccaaacacccggagacgaacccacccacaaaagcgaaaa

SEQ ID NO: 240752 - RNA, 73 nt, Homo sapiens
ggccaggcaggaagggagcccacaggacaggcagaaggcgccaggaaggaaacacaggggagagccgaccacc

SEQ ID NO: 240753 - RNA, 72 nt, Homo sapiens
ggacaccaacagagcaacgagaaggacacccaaagagaggcggggcgcggaggacgcagcggaacgagaccc

SEQ ID NO: 240754 - RNA, 60 nt, Homo sapiens
cagacaagagagaaaacagcagacaaccgacgcagaaccggcaggcagaaaaccgaagga

SEQ ID NO: 240755 - RNA, 68 nt, Homo sapiens
gccggaggagccagagcgcagaaagaggcagagcaacagggacacaagcaagaagaaagggaccgaca

SEQ ID NO: 240756 - RNA, 78 nt, Homo sapiens
cggagcaaggaaaaaaaccccacggaagagacagagagagccaaaccccagccacaagggcgacaagaccagccaacc

SEQ ID NO: 240757 - RNA, 56 nt, Homo sapiens
ggggagaagaaggccgagaaccacacgagagagaaagaacgcacaccaagggaaga

SEQ ID NO: 240758 - RNA, 65 nt, Homo sapiens
gcaagaagaacacccagaggacgaagaaagggcagacaccacagaaacaaacccggagacagggg

SEQ ID NO: 240759 - RNA, 78 nt, Homo sapiens
ggacggaccgagaccggaccgagagcggaccgagagcgcgaaacgcacgagaaggaaaaaaggccggaaggaggaaaa

SEQ ID NO: 240760 - RNA, 83 nt, Homo sapiens
agcggcggaccaaaccgcggagggcggaagggaccccaagaccagaagccagaggggagcagaagaggagaaggaggagagcc

SEQ ID NO: 240761 - RNA, 81 nt, Homo sapiens
cgaaagccacccacaaacaaacacccacggaaccagagacgcccgaaaaagcccaagacagcagaagcagacaccccagga

SEQ ID NO: 240762 - RNA, 88 nt, Homo sapiens
cagcagcaacagagaagaaaggcgaaaaaaccacgagcaccagcagcccccccaccacacacaggaccgaaagaaccgcacagagcag

SEQ ID NO: 240763 - RNA, 78 nt, Homo sapiens
cggagcggccggacggaaagcgacaagggaggcgccgccagcggccgggaccgaacaggcgaacgcggcagaacggag

SEQ ID NO: 240764 - RNA, 73 nt, Homo sapiens
cgggagaaagacacagcccacacccaggggcacagacagacgccccaagaaaaaaacaaggccaggcaccgac

SEQ ID NO: 240765 - RNA, 73 nt, Homo sapiens
gggccaggaccgcgagaccaggggcaacaggacccagaaacacagaagaaggggagccagaaggaggcggggg

SEQ ID NO: 240766 - RNA, 68 nt, Homo sapiens
acacccccaggaggcccggcagagcaggcaagaagagccacaagaagagccggagagggaagagaagg

SEQ ID NO: 240767 - RNA, 57 nt, Homo sapiens
cgccgggagccgccccgccagcgcgcccccgggcggggcgagcaagccccggaggac

SEQ ID NO: 240768 - RNA, 80 nt, Homo sapiens
agacgccaccccgccggaaaccaccacgacccgggaaaggaaaccaaaccaggaaagaaggacaaggagcgaggagaaag

SEQ ID NO: 240769 - RNA, 70 nt, Homo sapiens
agagccgcccgggccagcggccgcgcacccccggccggaggcaccagcgacacaagcaagcgaaaagaaa

SEQ ID NO: 240770 - RNA, 35 nt, Homo sapiens
acaaccaaaacaaaaacaccgcccgagagagacgc

SEQ ID NO: 240771 - RNA, 77 nt, Homo sapiens
gcgacgcaggccccacgaggggagggcgagccgccagaccacacgaaggggcagaagagcacaagacggaagagagg

SEQ ID NO: 240772 - RNA, 82 nt, Homo sapiens
gcgcgccccggcgcaccgacggaccgggaaggagcacccaggaccaccagaacgcagacaggcagcaaagaaaggaggagaa

SEQ ID NO: 240773 - RNA, 79 nt, Homo sapiens
gaaaaacaaccccaagacccacagcaaagaggacaacccaagggccagggggacagcaagcaggcccggaaagaaaaaa

SEQ ID NO: 240774 - RNA, 57 nt, Homo sapiens
aagcgagggcacgggcggcagcccgagaccgcagcaggagggccccaaggcggcagc

SEQ ID NO: 240775 - RNA, 43 nt, Homo sapiens
acaggcccgacagcccaaggagaacccggggaaaagaaggaga

SEQ ID NO: 240776 - RNA, 70 nt, Homo sapiens
agaaaggacccacgaaaacaaagcgagccacacgaaaaacaaaaacgcaaggacagaacagaaaacaaaa

SEQ ID NO: 240777 - RNA, 73 nt, Homo sapiens
cagacgcgcccagagcgcagcacgggcgcagaggggagcccaaaagcacgaagcgccagaggacaccgcggcc

SEQ ID NO: 240778 - RNA, 68 nt, Homo sapiens
gacgacgcaccgcaggcagacaaaagggccaaagaagggagagagcagcccgagcacgcgcagaccaa

SEQ ID NO: 240779 - RNA, 78 nt, Homo sapiens
caacacaccggaacacccacagcacccccaggcgccgagccagccgcacggccagacagcgggaagaggggcacgggc

SEQ ID NO: 240780 - RNA, 78 nt, Homo sapiens
ggccacaaaccaaacagaaggacaagcaaaaaaaaccgccccgccagcagaaggagagggcaggcacgagcaaggagg

SEQ ID NO: 240781 - RNA, 81 nt, Homo sapiens
gaagcccagaagccagcaaaacggggaacgagcgagagcgcaccggaccccgcaggcagccaacagccgaccgagcacgag

SEQ ID NO: 240782 - RNA, 80 nt, Homo sapiens
cagcgagaggagcgcgccgaggccagacccggccggggccgaaccgaccagaccaggaggggaggacaaaaccaacaaca

SEQ ID NO: 240783 - RNA, 74 nt, Homo sapiens
caaccaccggcggcccagcagagacccaaagacaggaccacgcaccagcagagaaggaaagcaaaccgaagcag

SEQ ID NO: 240784 - RNA, 77 nt, Homo sapiens
aaaccacgcaggcaaacgagaaaaagccgagaaggccagacggaacccgcgacgccaacagaggagaagaggagaac

SEQ ID NO: 240785 - RNA, 70 nt, Homo sapiens
aagaaaaacacgaagaaggacagaaaaaaagcaagggacccgaccagaaaggccagacgcagaggaacga

SEQ ID NO: 240786 - RNA, 63 nt, Homo sapiens
cgcggggcccggcagaaagggacgaacagcggggacgccccagcagaccgcccaggagaggaa

SEQ ID NO: 240787 - RNA, 77 nt, Homo sapiens
gccgaacccaccgagccagggagggccaaggagacggaagaagccaagaagaagcaagaaaacagaagcagaccagc

SEQ ID NO: 240788 - RNA, 79 nt, Homo sapiens
agggacgaaggcacaccacagcgcccgacgcgagaagcggaccggaggcggggcgcacagggcacccccgcccccccgc

SEQ ID NO: 240789 - RNA, 62 nt, Homo sapiens
gccaagccccaaaccggaacgaaagaggaaaagcgcccgaccgagccagccagaaagcgcga

SEQ ID NO: 240790 - RNA, 75 nt, Homo sapiens
cccaaagagcaacgaagacaacgcagcggcagaaacaaggcgcagggagaccaaagaggaaggggaccaacacag

SEQ ID NO: 240791 - RNA, 54 nt, Homo sapiens
agaccgcgcagaagacacgcccggaagaccagccaacagaaggagcacaacagg

SEQ ID NO: 240792 - RNA, 63 nt, Homo sapiens
ggcaacaacacaaccggacacaggcaaggcacccacccgcgaaccacaaggcggaaacaaagg

SEQ ID NO: 240793 - RNA, 70 nt, Homo sapiens
gaggaacaccaaaaggaacaaacaaagaggggaaacgggacacaaggagaaagggccgggagggcccgaa

SEQ ID NO: 240794 - RNA, 85 nt, Homo sapiens
gcacaggcagcccacacagccaggggacccaggagagaagccggccgcacgcacagccccagaaaggaccggagggagagccacc

SEQ ID NO: 240795 - RNA, 78 nt, Homo sapiens
gccaccagggagcagaggagcacgagaagaaccgaaccagcacacggaaaggcaggcaggccccagcgaagccacgaa

SEQ ID NO: 240796 - RNA, 83 nt, Homo sapiens
ggaagacccaggcggaaggggcgcgccccagaccggagaaccgccaggcccggaagagaagggcaaaaaggcaccgaccccaa

SEQ ID NO: 240797 - RNA, 82 nt, Homo sapiens
ccgggcccgaggaggcagccaagccgggccgcccgcggcgacaccaaccagaagacggagagagcacccgcaaaaggacagg

SEQ ID NO: 240798 - RNA, 58 nt, Homo sapiens
agaagcgacccagggaagagaagagaccaaggaacacgaaccgcagccgcaaccggag

SEQ ID NO: 240799 - RNA, 40 nt, Homo sapiens
cgcgcgcgaccaaagagcagaggccaggaggggcccagcc

SEQ ID NO: 240800 - RNA, 90 nt, Homo sapiens
gggccgggagggggcgcggggggcgccgggggggcccaagcgcagcggcccgcgccgcgggcgaacgagcacaagcccagagagagacgg

SEQ ID NO: 240801 - RNA, 74 nt, Homo sapiens
agcacaggccagggcagaggaccaacagggcagagagcaaggggagagaaggcaaaaagcgcccgcgagaggcc

SEQ ID NO: 240802 - RNA, 78 nt, Homo sapiens
ccagaggcagggggcgacccgaacccaaaggaggaaacagcggcaagccacagacggaacaagacaggcagaaaagag

SEQ ID NO: 240803 - RNA, 73 nt, Homo sapiens
agggacagaggaccggaggggagcccccccacgcccggcccacccccgggcagaggaccacagcccacgacca

SEQ ID NO: 240804 - RNA, 79 nt, Homo sapiens
aaaagaaagaagaaacaagggaccgaagcacccaagaccgaagaaggagaaccagcccaagcgcgcacacccggaggag

SEQ ID NO: 240805 - RNA, 73 nt, Homo sapiens
ccagcaccagaacagaccccaaaaggaagccaagacagaagacaccccgcccgaggaacgccccacaccacga

SEQ ID NO: 240806 - RNA, 75 nt, Homo sapiens
ccaagacgcaagcggcagccggccgggcggagaaaggaaggccacaccaggccccccacgcaacaagcccccacc

SEQ ID NO: 240807 - RNA, 75 nt, Homo sapiens
cgccggcccacgcgcggccaagaggagacggaggcagagagaagagggagaggccggaggaagggaaggggccgg

SEQ ID NO: 240808 - RNA, 82 nt, Homo sapiens
cgaggggccagcgcccacccaagcgcggaaggagaaggggagcggcaggcgcccccaggccaaccacacagagccgcacgaa

SEQ ID NO: 240809 - RNA, 56 nt, Homo sapiens
ccacacagccggcccgagggggccccagcagaaagccaccgggcagaggcggaccg

SEQ ID NO: 240810 - RNA, 87 nt, Homo sapiens
cgcccgcaaagaagagccacgggcggcggcaaggccagcgaaggacccgcagggccccgggccagcgggccgacaagaaagccgagg

SEQ ID NO: 240811 - RNA, 97 nt, Homo sapiens
caagccccagcgcagcgggcccgggccagccgcaggacggcccccaagacagaacaccgcagaccacaccccagcaaaaaagagccccagcaagaag

SEQ ID NO: 240812 - RNA, 81 nt, Homo sapiens
caagaagaggagcaggacaccaacagagcaacgagaaggacacccaaagagagacgcccggaggacccccccgcacaaaga

SEQ ID NO: 240813 - RNA, 69 nt, Homo sapiens
agaagaaccacacgcaggacagccagcaagcagaggccagagcagcagcaaaaaaaggagcacaggacg

SEQ ID NO: 240814 - RNA, 75 nt, Homo sapiens
cggaggagcaggcgagaagagaagcagggcagaaaagaacagacccagaagaagcgaaaggggagaaagaagaaa

SEQ ID NO: 240815 - RNA, 81 nt, Homo sapiens
caaaaggaaggaacccccaaacaggagcaccgcggcgcaaaagagacgaacgcaacagagaggcaacagaccagacaggaa

SEQ ID NO: 240816 - RNA, 58 nt, Homo sapiens
ggacaccggaagcgggaaaggcggaaggaaaagcagaaaagagaaaagaagaagaacg

SEQ ID NO: 240817 - RNA, 87 nt, Homo sapiens
gaggagccgcaggagaaggaaccagcggggagaaggcccagcgaagcgcacagcgaggaggggggcgcgcagcccggggaccccccg

SEQ ID NO: 240818 - RNA, 72 nt, Homo sapiens
gacagggaagcagccggaggcacgggcgaaggccagaaccgagaggaaacgaaggagcccagccagcacagc

SEQ ID NO: 240819 - RNA, 77 nt, Homo sapiens
ggacgaagcccaaaccacaagccacaaaagcgcccccaagagggagaagaagagagccggggaggaagaaaaagacc

SEQ ID NO: 240820 - RNA, 72 nt, Homo sapiens
gaagggaaaacaagcaagcgccacagagcagggggagaccagcgaagccgcgccagacaccggagaaagagc

SEQ ID NO: 240821 - RNA, 53 nt, Homo sapiens
agagcgcgcagaaaagcggggccccaaaagaccgggaagagccaaacagacac

SEQ ID NO: 240822 - RNA, 70 nt, Homo sapiens
gccgcgaggaggcggcagagggggacggaagcggcagcgggcagccggcccagcacagggagcagaaccc

SEQ ID NO: 240823 - RNA, 63 nt, Homo sapiens
cggccaagaagggccaccccacagacgccaaaccagcagaccacagcacaggcaccggacggg

SEQ ID NO: 240824 - RNA, 82 nt, Homo sapiens
gacggcgacgccggagccgccgccaccgccagcagggggaggaccacgacggacaggagcacagaccagcgcgcgaccggag

SEQ ID NO: 240825 - RNA, 77 nt, Homo sapiens
acgaagggaagcgcagaaaggaaaacaaaggagcacaggaggaccaagaaaggcccagggaccaaagcccggacaag

SEQ ID NO: 240826 - RNA, 58 nt, Homo sapiens
aagaagccagaaggaaaaagcgggaaaggcggaagaacaggagcccgggagaaagaca

SEQ ID NO: 240827 - RNA, 83 nt, Homo sapiens
ccccaccccacagccggagcaccagaaagagcacagcaccgcccgcccccacccccaccacccagcaggagcggggcggccgg

SEQ ID NO: 240828 - RNA, 90 nt, Homo sapiens
caaacaaaaggaaagccgcacagcgcacaaggggaaacccaggcaaaccgacaccagcgacacaagcgcgagggaaccacagaggacagg

SEQ ID NO: 240829 - RNA, 72 nt, Homo sapiens
ccacaaaggaacccgggcggacagcgcccaaagccaggccccggacagagcagacacaaccagagacgacag

SEQ ID NO: 240830 - RNA, 68 nt, Homo sapiens
acccaaggaaccaggcgaaggaacaaagggcagaagcagagaacagaggccgagcaggagaaagcggc

SEQ ID NO: 240831 - RNA, 71 nt, Homo sapiens
gaggagggcgggcgacccaccgccggccacagcgcagaaggagaaaaggcgccccggcaaaacaaaaaaag

SEQ ID NO: 240832 - RNA, 68 nt, Homo sapiens
aacggagcagaggccaacaggaaacaggcaccagcagaccacacaagaaaagcgaaccacaccagcaa

SEQ ID NO: 240833 - RNA, 41 nt, Homo sapiens
acagccaacacggcacccacaggggaccagaagaagaccga

SEQ ID NO: 240834 - RNA, 60 nt, Homo sapiens
ccgggcagcccgagcggcaggacaacaggcccaacccaagccagggggcccaggaacagc

SEQ ID NO: 240835 - RNA, 67 nt, Homo sapiens
agaccaaggaagccgaagaggcgcgaacagggcccacccgccacgacacaggggaagaagaccaccg

SEQ ID NO: 240836 - RNA, 65 nt, Homo sapiens
gggcaggaggaggacggcagcaaccgcagcagcagcccaggcagaaacgaggcgaccgagcagac

SEQ ID NO: 240837 - RNA, 74 nt, Homo sapiens
aaacacagcggagacaaacgcgaccccccaaacaaagcagcgcaccccccacgggcagcagggggagaagcaga

SEQ ID NO: 240838 - RNA, 81 nt, Homo sapiens
gccccgggcgccacgagccacaggaaccaggcgaccgaaaggccggacaaaaagcggacagcggaagagagcaacaggacc

SEQ ID NO: 240839 - RNA, 64 nt, Homo sapiens
aagaaagagcagaggaagaggaaagcgaacgagagaggaccagaaccagaccggaaagcaccag

SEQ ID NO: 240840 - RNA, 87 nt, Homo sapiens
cgcagacggcgcccagcaacacagaagccgacaaggcgcaagcgaaaacagaccgcgagcccagagaacagaggcaggaaaggccgg

SEQ ID NO: 240841 - RNA, 77 nt, Homo sapiens
gcaaaacggacccccacaaaagaagccgacggagcgaaaaagacagggagcacaccacccaagccacggacgaaacg

SEQ ID NO: 240842 - RNA, 78 nt, Homo sapiens
aaaaagaggacgaagagcacacgaccacaccagggcagaaaccacaaacagcccgcagggcaacggaagcagacaaaa

SEQ ID NO: 240843 - RNA, 75 nt, Homo sapiens
gagccaggccaacgagggcggaaggcaagaaagacaagacggcacaaaggggggcgcgacggaaagaaacacaag

SEQ ID NO: 240844 - RNA, 77 nt, Homo sapiens
aaggagcccgcgacgcgaggccaaggaaagaagggaaacaccccaacccccagagacccacggcagggggaggccgg

SEQ ID NO: 240845 - RNA, 75 nt, Homo sapiens
cccaagccccaccgcgagacggaccaacggaaaaacgagccagagccaaggagcaagaggccgccgaagaggccc

SEQ ID NO: 240846 - RNA, 51 nt, Homo sapiens
cgcagggcgcccccggggacagcccaccacaagcaggccccaagcccaaca

SEQ ID NO: 240847 - RNA, 71 nt, Homo sapiens
aacaaccgggaccgccgcccccaaagacagcccacaccggcaggccaacaaccaagacgaacgaacgccca

SEQ ID NO: 240848 - RNA, 84 nt, Homo sapiens
cggggggacccgcgcgcacgggcccccacgaggacaagggcgcgcggcagcgacgggagcaccgcggacgccccagggcacacc

SEQ ID NO: 240849 - RNA, 57 nt, Homo sapiens
aggaaaagccggagaggaccacacaaccgagcagcacaggagcaacgcacgaaaacg

SEQ ID NO: 240850 - RNA, 74 nt, Homo sapiens
ggggaggaggaggacagaggagcacgagcgaggcggagcccgaagcagcgcaaccggccaggaggaggcaccag

SEQ ID NO: 240851 - RNA, 72 nt, Homo sapiens
cagaagagcaggagcagccgagcaggcagcacaagggagcaacaaaaaaacgggacgagaacccccgcgaac

SEQ ID NO: 240852 - RNA, 84 nt, Homo sapiens
gagcgaggcgcggagggccggagacgcgcagacccgcgacccggagcagccggaggcgggaaagaacgaccccagcagaaaaga

SEQ ID NO: 240853 - RNA, 89 nt, Homo sapiens
aacgagcaccgaggaggacacgagaagcggccagcgacaccgacaggcaggagcgaggcagcgcaggagcagaccggagccggaggaag

SEQ ID NO: 240854 - RNA, 75 nt, Homo sapiens
gagacccgcgcccagaaccagggaggcaagacccaggggagaccagccgggcagacgcccgaaccggcagaaacc

SEQ ID NO: 240855 - RNA, 58 nt, Homo sapiens
gcgggcccgggccaaccgaggggggggcgaccgaggaaaaaaagaaccaagagaaaag

SEQ ID NO: 240856 - RNA, 67 nt, Homo sapiens
cgagaagaaaaagaagagagagacacggacaagagccggaagagcgcagaagccggaagagagccaa

SEQ ID NO: 240857 - RNA, 77 nt, Homo sapiens
cggaggcggcccgcccggaaggcaagcgcagcaacaacagagagcacgggggccaaaaacagagccaagagaaaacc

SEQ ID NO: 240858 - RNA, 87 nt, Homo sapiens
gcagagcgcggacccggcgccgaggcggccacccgagacgcggcgcgcacgcccggccgcgagagggccgaggcagacaagggaaag

SEQ ID NO: 240859 - RNA, 73 nt, Homo sapiens
gagaaaaccaagaaggagagaagagcagaacccaggggaagggaaccgcgaaaacccggcaggaaacagaaga

SEQ ID NO: 240860 - RNA, 79 nt, Homo sapiens
gaagccagggcagcgaaagacagagacccagaagacgaccccgacgcaggccaggagccgcggacagaagccgagcacg

SEQ ID NO: 240861 - RNA, 77 nt, Homo sapiens
cagcgcagccgccgaccacggcgacggacacgaggagcagaagcaggaagggggagcaacagacaagcccgaaagga

SEQ ID NO: 240862 - RNA, 75 nt, Homo sapiens
gggaaaaaggagcaccacaggggcgaagcaaagccaccacagacagcccgaacaagaaagcggcagcccagaacc

SEQ ID NO: 240863 - RNA, 79 nt, Homo sapiens
gacagcgccgccaccgagccgggcccaccccccaccaaggaaggccgcgggagagcgggggcgggaggcgggccccggg

SEQ ID NO: 240864 - RNA, 69 nt, Homo sapiens
gaaaaccaggcaaagagacagggaaaacaacagcagaaaggcaagaacgaagcaggaggggaaggcgcc

SEQ ID NO: 240865 - RNA, 82 nt, Homo sapiens
aagggcgggaccaacagggagccagaccagccgacagcgaccaaggccagagcgaaaggccacggccagccgccggcacgca

SEQ ID NO: 240866 - RNA, 73 nt, Homo sapiens
ccccagacacacacacccaacccaaaccaagaccgacagaacaagcgcaaaaaaagaagagcagaaacgccaa

SEQ ID NO: 240867 - RNA, 76 nt, Homo sapiens
aagcagggcgaagggaacgcaaggcccccgaccacacgcccgcgcgagagggcaggcacgagcaaggaggagcccc

SEQ ID NO: 240868 - RNA, 76 nt, Homo sapiens
cccagcagcacgcaaacaacacagaggacacagaaggcaagaaacaacagcgaccagagccgaagagaacgcgaag

SEQ ID NO: 240869 - RNA, 41 nt, Homo sapiens
gggcccccaaccacgaccgggaagggacgcgagagaaaaga

SEQ ID NO: 240870 - RNA, 74 nt, Homo sapiens
gcgcagcggggccaagggaccggagaagaagaacgaggacaggaaaaagagagggcaccccagaccgagaccca

SEQ ID NO: 240871 - RNA, 73 nt, Homo sapiens
gacgcagggcgcccccggccggggggggcacagagccccggaagacagcccccagcgaccagacccagggcca

SEQ ID NO: 240872 - RNA, 63 nt, Homo sapiens
cgggcccgggccaggccgccgccgagccgagagagcgaagacggagccgcccagcaggcagcg

SEQ ID NO: 240873 - RNA, 61 nt, Homo sapiens
cgcggcggagggaccggcccgcgaaggaccgggagccgcagggcaccgaccgggcaagcca

SEQ ID NO: 240874 - RNA, 54 nt, Homo sapiens
ccagacgcacaggaaccaaccacagcggaccgcccccgaagccggaagaccggg

SEQ ID NO: 240875 - RNA, 98 nt, Homo sapiens
ggaccaggcacagaagcacgaaaaagcgggaaggccggaaaggaccagaccgcccaggaaacgacccccccaagacacaagacccaccaccccaccga

SEQ ID NO: 240876 - RNA, 77 nt, Homo sapiens
gcgccgccagccgccgagagagagaccgagaggcagggagcggcgaggccgaagaagacaaccgagcacaaaaaagg

SEQ ID NO: 240877 - RNA, 70 nt, Homo sapiens
gcccaaacacacccaggcccaggaagaaggaagaagacggcacgggacccccagcacaggcagcaggccg

SEQ ID NO: 240878 - RNA, 77 nt, Homo sapiens
ggacccgacccgggcagcacccccgacagccggccgggacccaaccgcgagccagcaggagagagccaaaacgacag

SEQ ID NO: 240879 - RNA, 74 nt, Homo sapiens
gagcccaggggccacccagggcagagagaaaaggaacagccgaagccaggggcaagcgaaaccacagaagaaag

SEQ ID NO: 240880 - RNA, 53 nt, Homo sapiens
cgccggacagcgcagagccaagacggagaaacaagagcaaccagccagaggca

SEQ ID NO: 240881 - RNA, 34 nt, Homo sapiens
ccgacagccgcagaaccagggacgcaccaaaacg

SEQ ID NO: 240882 - RNA, 70 nt, Homo sapiens
gacaaaagccgaagaaacacagaaggcgcgcagggggaggaaaggggcccagacagcggagcagcgcaag

SEQ ID NO: 240883 - RNA, 73 nt, Homo sapiens
gcaaccaaccaccgcggcggcacagacaccacaggccacacggagagcggggagcacaccggaggcgaggcgc

SEQ ID NO: 240884 - RNA, 77 nt, Homo sapiens
gcacaaacacaaaaggagaacaggaagaaccaacaacggcagccccgcagaacaaacacggacccgaccacacgacg

SEQ ID NO: 240885 - RNA, 63 nt, Homo sapiens
ccccgcagagcggcgaaccggggcaggaggcccagaggcacacaggaccgagaagaccccgcg

SEQ ID NO: 240886 - RNA, 87 nt, Homo sapiens
ccaagaagccgagacacgcggggaggcacaaggcgggacagccaagccaccagaagggggggaggggccacacaccgcaaaccagaa

SEQ ID NO: 240887 - RNA, 45 nt, Homo sapiens
ggcgcgcaggccgcggggagcaccgggagcgaaaacgccacaaca

SEQ ID NO: 240888 - RNA, 71 nt, Homo sapiens
ccaaaccgaagagcggaagagaaagacaaggagacggccacagaggggggggcagccagaagaaggaccgg

SEQ ID NO: 240889 - RNA, 81 nt, Homo sapiens
aggacagccccgccggggggcagggcccacgacacaaacggaacgccgcgcgaggacgcggcaggacccaaggggccggca

SEQ ID NO: 240890 - RNA, 82 nt, Homo sapiens
aggaaagaagaaaaagaaagggcagccaaagaagacacgcggaagcgaggagcggcccccacagcccaggaagacagaaaca

SEQ ID NO: 240891 - RNA, 69 nt, Homo sapiens
cccagacgaaagcccagccacccagggcagaaagaacgagaaagcaaaggggccgacgacgagccccgc

SEQ ID NO: 240892 - RNA, 70 nt, Homo sapiens
agacgacgggaagagcagccggagccgggcggagggggaccccggcccggcagggcccaaggagggagcg

SEQ ID NO: 240893 - RNA, 73 nt, Homo sapiens
aaggcaaggccgaggccgcagagagacaagaacaaacggacaccacaaaggggggaagcgaggcaggaagccc

SEQ ID NO: 240894 - RNA, 74 nt, Homo sapiens
acaccgccccaacccacgagaggacagcccaggaggggcaaagacacgcgccaggaaaaggaagagagagaagg

SEQ ID NO: 240895 - RNA, 81 nt, Homo sapiens
cacacaaagaacagcggcagacggaggagaggcaaagcaaacgccagaaggacaaggccgccagaggcggcaccaggcggc

SEQ ID NO: 240896 - RNA, 102 nt, Homo sapiens
gagaaacgcaagaggagcgaagcaacgaaacagccaaaaagcagaggaggagacagccgcagaccaggcaagcccaggagcaccggcccccaaggcccagga

SEQ ID NO: 240897 - RNA, 51 nt, Homo sapiens
aggagaaacaggagcccagccccggagacccccggcgaccaaagaaaagcc

SEQ ID NO: 240898 - RNA, 65 nt, Homo sapiens
gcggaccgccccccacggggggaggagggacaacacacaacgcaggcgcacagccgccccaacaa

SEQ ID NO: 240899 - RNA, 39 nt, Homo sapiens
cgccagccgccagcacaaaggcaaaaggccaaaacggaa

SEQ ID NO: 240900 - RNA, 78 nt, Homo sapiens
cgcgcccgccgcgcggagcgcccccgcgccccgcaccagagcggggcaccgagccggggacaagagaaaaaaagggcg

SEQ ID NO: 240901 - RNA, 58 nt, Homo sapiens
gcaaccgcacgagccacggaaaaaccgcagccagaagacgcggccggagcccccccag

SEQ ID NO: 240902 - RNA, 77 nt, Homo sapiens
gcggagccgcgcgcgcgggcgccccccgggacagcccgaagccgagcagcccacacacgcgaccaccaaggcaaacc

SEQ ID NO: 240903 - RNA, 70 nt, Homo sapiens
ccggcgaggcccaccaagccaggacgcgaaccccaaggggaacagaaaaggggaagacccggagacagac

SEQ ID NO: 240904 - RNA, 66 nt, Homo sapiens
ggcaccggcaaagacggccgaaacacgcaggaaggggaggagcacagaacgccaggaccaaaacag

SEQ ID NO: 240905 - RNA, 64 nt, Homo sapiens
agaaggaccaagaaccaggagaaaccggggcggggggcggccaaaggaacacagaagggaccag

SEQ ID NO: 240906 - RNA, 69 nt, Homo sapiens
ccgggccggaggcaaggggccagaggacagaggacagcagcaggcgcaaaaacgaacccacaaccgaac

SEQ ID NO: 240907 - RNA, 96 nt, Homo sapiens
gaccagcacgaccggaggccacacagcaccggcaaaggccagccagggcaccaggagcgccccggcacaaagcagaccgccccacgggcgcgcccg

SEQ ID NO: 240908 - RNA, 82 nt, Homo sapiens
caacggccaaccggcaagaccagacgggaacgggagacaagcgcagcgagcggaagaagaacaagaaagacccaccacagga

SEQ ID NO: 240909 - RNA, 78 nt, Homo sapiens
caacacaaagaagaggaaaacgcaaaagcaccacgaccagagcagaaaccacaccgccaagagcacaaaaaaaaccag

SEQ ID NO: 240910 - RNA, 70 nt, Homo sapiens
aggacccgcgagcccacgcagagcaggggcaacagagagccacagaaagcagaggggaagcgcccgggac

SEQ ID NO: 240911 - RNA, 54 nt, Homo sapiens
cgaaagcggggcacaggcgggcacgcgcccaggaagaccgggagcacagaagaa

SEQ ID NO: 240912 - RNA, 68 nt, Homo sapiens
ggagccaccaaccagacagaagacgaccggcggggcacgggaaggcacacgaagaagccacacaccga

SEQ ID NO: 240913 - RNA, 78 nt, Homo sapiens
cccccccccccacgcaaccccagaccaacacacaaaaacagggccagacgggaagaaacgagaagggaccaggggcgg

SEQ ID NO: 240914 - RNA, 75 nt, Homo sapiens
ggagccagcaggggcagcaagagcggccagggaagcgccacgcagagccccgccaggaagacacgccggggaacg

SEQ ID NO: 240915 - RNA, 68 nt, Homo sapiens
caaccagaaggggagaaggcaggcaccacaaaaaggacaggcccgaaaagaaagcgaacacacaaaac

SEQ ID NO: 240916 - RNA, 77 nt, Homo sapiens
aaaccgagccacgcaccggccagcagcccgccaggcccagcgagcgacggcaaaagcaggccaggccacacaagccc

SEQ ID NO: 240917 - RNA, 79 nt, Homo sapiens
cacccggggcccaaccagcccacaacaccacaccgaacccggggggaccgcagccccccccccaaaacccaaggacacc

SEQ ID NO: 240918 - RNA, 87 nt, Homo sapiens
gcggaagccgaggcagaggcgacacaagaagagggcggagcggagacgggagaagaaaagacggaccagcaaggcagcacgggaggg

SEQ ID NO: 240919 - RNA, 74 nt, Homo sapiens
aaccgcaggcaaagagagccgacaacaagaacgaacaccagaagcagccgaaacgaaccaagaaccgaaggaac

SEQ ID NO: 240920 - RNA, 60 nt, Homo sapiens
cagccaccgcaagccaacagaaacagccggggaccgccacgagagcagaaggccggagcc

SEQ ID NO: 240921 - RNA, 71 nt, Homo sapiens
gccagccgcagcgccacggcgccgagaaccaagaccggcagcgggggagaggggcggggccaacgggggcc

SEQ ID NO: 240922 - RNA, 56 nt, Homo sapiens
gggcaccagaaggggcgagggccaagggaacggggggaagagagaaccccaaaggc

SEQ ID NO: 240923 - RNA, 83 nt, Homo sapiens
ggaacgccgccaaaagccaccgagggagcgaaaaccgggccaggagcgcagaggacacaaccccaacagagcggcaaacaggg

SEQ ID NO: 240924 - RNA, 56 nt, Homo sapiens
ggaaagaaaacaggaaagccaggcgcaaagggaaaaccccccaagagggacagaga

SEQ ID NO: 240925 - RNA, 60 nt, Homo sapiens
ggcaaacgggaaagggagaacagggacagacgaaaagaagaggaaggacgcaccggagca

SEQ ID NO: 240926 - RNA, 76 nt, Homo sapiens
caaccaaggcaaccagaggcgcgacgcagccaaggcgaagcgcgaaagaggcagaagaagggggagagccaaagaa

SEQ ID NO: 240927 - RNA, 79 nt, Homo sapiens
aggagcggaaggcgcgaggcaacaaggggggagccgcacgacccgaacgccagagacaaaaccagccagaccaagggca

SEQ ID NO: 240928 - RNA, 83 nt, Homo sapiens
aaacggacccgccaagaccgggaggagaccgcacgcccagcgacagaacagagcagcccgacggccaggaggcgaagagacga

SEQ ID NO: 240929 - RNA, 81 nt, Homo sapiens
gcaagaacggccaagaaagcccgaaaaccaaggcaccgagagggcgcgagggcgcgcacaaccggcccagcaggcacccga

SEQ ID NO: 240930 - RNA, 87 nt, Homo sapiens
gcccgcccgcggccccgcagcagcccaagaaggaaccaagagaccgaggcaagagcacccacagcgcgagccgccgcacgcaggggc

SEQ ID NO: 240931 - RNA, 78 nt, Homo sapiens
ggaccacacagcccagagggacagaaccaaagagggaaccacggaaggagggggcgacacacaagcaggggggaccga

SEQ ID NO: 240932 - RNA, 77 nt, Homo sapiens
cgccaaccaaagagcacagccaccagccagcaagcccaagccagggaacaagcagaaagcacgaacaacgagaacaa

SEQ ID NO: 240933 - RNA, 67 nt, Homo sapiens
agagaaggggaagccccagcgcaggcagagcaccggcacccgggcggcgcgccacaccagcaccggg

SEQ ID NO: 240934 - RNA, 73 nt, Homo sapiens
agacccagccagccaccagccggagcaagggcggagaacggaaaagcaccaggaagcagagaggaccgcagaa

SEQ ID NO: 240935 - RNA, 61 nt, Homo sapiens
caggaggaccaggaaggggccagagggccccgggcgggcaggaacagaagaggcgcccccc

SEQ ID NO: 240936 - RNA, 77 nt, Homo sapiens
gacacgcacaaacaagaagcgcaccccagacaacaggcaggggaggaccagcggacgaagaacggaagcgccccaga

SEQ ID NO: 240937 - RNA, 69 nt, Homo sapiens
cgggaccaacagggagccaggcccggggggacccaggccccaaagcgggacccgacacagcgcagggaa

SEQ ID NO: 240938 - RNA, 72 nt, Homo sapiens
aggggagcgggcccacagccacgggcccagcagaccaccggaccgcggcaagcgggagcggacccacccaag

SEQ ID NO: 240939 - RNA, 68 nt, Homo sapiens
gccggcggggcggggggagaagggcgcagagacccccgccaagggccaaggaaagagggaaccccaga

SEQ ID NO: 240940 - RNA, 66 nt, Homo sapiens
cccaagccagggggaaaccaggggagagggacccaccacaaaggcccacaacgacagcagaccaca

SEQ ID NO: 240941 - RNA, 72 nt, Homo sapiens
aacccagaccacccacaggagcaacaggagcacagaccaggaggaaaaagcagaaaaggaaagagcaagcag

SEQ ID NO: 240942 - RNA, 61 nt, Homo sapiens
ccccgaaccacccacgccaaccccagcccagagcagagcaggggcaagaaggaacagacaa

SEQ ID NO: 240943 - RNA, 35 nt, Homo sapiens
caaagggaccagaggcagcggcaaaagcagcccag

SEQ ID NO: 240944 - RNA, 81 nt, Homo sapiens
cgcacacggacgagaacggagagaacgcggaaggagacggagaagaagggacacacccagaagggcagaaaagaaaaggcc

SEQ ID NO: 240945 - RNA, 61 nt, Homo sapiens
gaagagaaagcccagaaacagccagaccaaagaaaacgaggccaggagaaaagaggagagc

SEQ ID NO: 240946 - RNA, 67 nt, Homo sapiens
accagacaaggaaacagcagaaaccggaaccacacacaccacaggaagccaagcaccaagcggaaaa

SEQ ID NO: 240947 - RNA, 77 nt, Homo sapiens
caagaggcggccaccagaagaaggcgacaaacaccacagccagcacaaaagccagaaaggaaaagcaaaacaggaca

SEQ ID NO: 240948 - RNA, 74 nt, Homo sapiens
cacggcagaaggagcggaaggcggagcgaagagccggaccaagcgccaggccagccaaaaaccgggcgcagaac

SEQ ID NO: 240949 - RNA, 79 nt, Homo sapiens
cgaaggcgggcgcagcggcggagcggagcggagcccggaggggcggagaacggaaaagcaccaggaagcagagaggacc

SEQ ID NO: 240950 - RNA, 70 nt, Homo sapiens
ccgcagggacgaggccccaagaacccagaccccaggagacaaggaccccgggacgcggaacagcgacgcc

SEQ ID NO: 240951 - RNA, 72 nt, Homo sapiens
cccacgcccaggcggcacccacgaaacaacagagaccaccagggggaaggggcaaagagaaccaggagaccc

SEQ ID NO: 240952 - RNA, 76 nt, Homo sapiens
ggaggaaaccgacggcgcaagagaaacgcaccccagaagcgaggcgaagcagcggcgagaaacgagagcacgagaa

SEQ ID NO: 240953 - RNA, 75 nt, Homo sapiens
gcgggcgggcccccagccaggccgcgcaccgcaggaaacgcagcagaggcagaacggaagggacacagaagagcc

SEQ ID NO: 240954 - RNA, 35 nt, Homo sapiens
accggaacagacgcaggaaggcgagagggaagaac

SEQ ID NO: 240955 - RNA, 78 nt, Homo sapiens
gccgaccgcacgcgggcgcgagaacggccgcccgccgcagcggagcaggaagcaggaaaccggcaggccagcgagaga

SEQ ID NO: 240956 - RNA, 50 nt, Homo sapiens
acgcggccagcgaaaacgcccaggcaggcgacacgagacccacgccaccc

SEQ ID NO: 240957 - RNA, 80 nt, Homo sapiens
gccaagagggaagcagacgagagcaaggccaagcagaagaaccagcacaggcgaagccaaccaggcgcaaaggaacagcg

SEQ ID NO: 240958 - RNA, 88 nt, Homo sapiens
aagaaagaggagaaacgacggaaagccaggccagaagaaggaaggccggggaggggacaggaaagacacaccaccccaccgaacaagg

SEQ ID NO: 240959 - RNA, 51 nt, Homo sapiens
gaagagggaggcaagaaacagaagagccgccgcagggcgaaggcgaggacc

SEQ ID NO: 240960 - RNA, 58 nt, Homo sapiens
cagcaaacccgcccgagggcaccacgccaccgagagaggacccagcccccggagaagc

SEQ ID NO: 240961 - RNA, 70 nt, Homo sapiens
aggcccagaccccagccggacggacaccaggaaaccgggaacgacgcagagagaaccccagagggcgcgg

SEQ ID NO: 240962 - RNA, 60 nt, Homo sapiens
ggaaaggaaggggacagagaacgcaaacaacgaaaaggaacccaaagcacaaaggcggag

SEQ ID NO: 240963 - RNA, 39 nt, Homo sapiens
cagagggccccggaccaaaagacaagggaaccgggaccg

SEQ ID NO: 240964 - RNA, 80 nt, Homo sapiens
gccccaagcccagcgggaccgagccagggaggcgaggcccgcaccggaagagcccaaggacccagaacccaaaaagaccc

SEQ ID NO: 240965 - RNA, 62 nt, Homo sapiens
gcgccagcgcggggcaacaggcagagggaaccaaaaaaaacagacaagaaggaacacaaggg

SEQ ID NO: 240966 - RNA, 70 nt, Homo sapiens
gggcagcgaaagaaaagggaagcccacccagccgaccgaacccaacagacacgaaaaggacacaaagaca

SEQ ID NO: 240967 - RNA, 77 nt, Homo sapiens
agccaccccaccgggccccagaccggcgaccgagagcccggaccagcagagggccgacggcaacagcaagagaaaag

SEQ ID NO: 240968 - RNA, 55 nt, Homo sapiens
gcggaccagaagccagagcgaggacgccggcagacagcgaacccacccaacacgg

SEQ ID NO: 240969 - RNA, 85 nt, Homo sapiens
ggccgcccgggccgggccccaccggacgggcggaaaacaccccaaaagccaaaagggaaaggaaaagaccaacaacagcgcagga

SEQ ID NO: 240970 - RNA, 80 nt, Homo sapiens
gccccgcagccccccccaccgcccagaccggcagcccagcaaagcgcacgcccgagccgagacgcaccagagccggaccg

SEQ ID NO: 240971 - RNA, 77 nt, Homo sapiens
ccacacggcagaaaaagaccagggagccaaggaccggagaacccagcccggacacaagcgggaggaacgggcaagac

SEQ ID NO: 240972 - RNA, 76 nt, Homo sapiens
cggaaggacggccccgagccgccacggaacccagaacaggccaagccccacaggccacgagcccacggcgacgggg

SEQ ID NO: 240973 - RNA, 86 nt, Homo sapiens
gcagccgccgccgcagcgcgaacaggacgccgcaacgcccaaccaggagaacacagggcgccggaagagggaacgcgaagggaaaa

SEQ ID NO: 240974 - RNA, 55 nt, Homo sapiens
aagggcagcaaggcagaagaagagcgcaacggcgacccgaccgggcggggcaagg

SEQ ID NO: 240975 - RNA, 73 nt, Homo sapiens
gacccagcgagcagagcccgccaaggccagggccgacggcccaaccacagagcaccgaggcacacagagaaaa

SEQ ID NO: 240976 - RNA, 74 nt, Homo sapiens
aggggggcccgcgcccaggacaggcccagaaaaccagacgagagacagaagacgaaagggcaagaaagagagca

SEQ ID NO: 240977 - RNA, 87 nt, Homo sapiens
accacggccgggacaccagggcagagcgaagaagcaggggagaggccgagcgaagaaccagcggccaaggaggccagaccaagacca

SEQ ID NO: 240978 - RNA, 72 nt, Homo sapiens
ccccgacccgagcccaacgggcccgccagccccagcggcgccgagaaaggaggccgagcccgaaacaacccc

SEQ ID NO: 240979 - RNA, 82 nt, Homo sapiens
cgacacgcggcccccgaccgcgagcgacgcgcccacggaggaggcgggggccccacaagaagaccaacaggaaggcgaggag

SEQ ID NO: 240980 - RNA, 38 nt, Homo sapiens
acgcaagacgcccggcccggaacgcaaggagggacagg

SEQ ID NO: 240981 - RNA, 67 nt, Homo sapiens
acaacggcacccccgaaagcccaagaacaccggaaacgccaggccacaagggagcaaacgaaaagcc

SEQ ID NO: 240982 - RNA, 82 nt, Homo sapiens
acacccgcgcgcgcccgggaggaaggaacgaggcaaggagcaaagcagcggcgcagcccgggaagaacggcacaagcccggc

SEQ ID NO: 240983 - RNA, 72 nt, Homo sapiens
acagcgagcaggacgggggcgagcgccgggaaaagacgccaacagacccaggaccagcccgaagggggggca

SEQ ID NO: 240984 - RNA, 77 nt, Homo sapiens
cagaccacagccgaaacaaccaacgacaacaaggcagaagggaagaaggagaaagggccaaccccgaagaagcaaac

SEQ ID NO: 240985 - RNA, 77 nt, Homo sapiens
ggccgccaccaccaccccagccaggcagcaccccagcaaagggccgcagcagcaaggccaagaaaccgccgggggag

SEQ ID NO: 240986 - RNA, 84 nt, Homo sapiens
gggccccaagagggaagcaggggcgcgccccaaaaaaagcaagggccaggcaaggaggaagaacggaagaagcgggaaccagag

SEQ ID NO: 240987 - RNA, 74 nt, Homo sapiens
ccaaggccaaaagaaaggcagacgaagggaaagcccagaacaggggaaagcaggggagaaaagaaaagaaagac

SEQ ID NO: 240988 - RNA, 71 nt, Homo sapiens
gcggaggaaaaggaggaacacagcagacacaagaaaagcagcagaccaagacacccaggagaaagacagcg

SEQ ID NO: 240989 - RNA, 54 nt, Homo sapiens
acggaggcaccagaagaagcaccagcgccgcgaggcacaccgggccaccaacca

SEQ ID NO: 240990 - RNA, 58 nt, Homo sapiens
ggaaggagggcgccgagcaacaaccgccgagcgacaacaagggagaaagcggcgcagc

SEQ ID NO: 240991 - RNA, 84 nt, Homo sapiens
caaaagaaagcccagagaaccaagcgccccaggccacacgaagacccaggacccagccaaagcccccaacaccccgacaccgag

SEQ ID NO: 240992 - RNA, 79 nt, Homo sapiens
ccgccgcgcagcgggccagcccccgcggcgacagcggaggcgaccacccaaccgccgcacagggccagccagaaggccc

SEQ ID NO: 240993 - RNA, 63 nt, Homo sapiens
gaaaaaaaggagcgcccgagcgaccaaagaccgggaaaaggacccgagcgaccagaaagccaa

SEQ ID NO: 240994 - RNA, 82 nt, Homo sapiens
cagggcgaagggaacgcaaggcccccgaccacacgcccgcgcgagagagcagcaccagcagaagagggcccgaccacggcaa

SEQ ID NO: 240995 - RNA, 68 nt, Homo sapiens
cagccacggacggcacagcccgaccggccgcgagagggagaagaaaccaagggagcgggagccaaaaa

SEQ ID NO: 240996 - RNA, 104 nt, Homo sapiens
acaaggggcccgcaacccccagcagcacggggaaggaccggacccggcccgggagcaaaggccccgagccccggccccaaagacccaaaacagagacacccccc

SEQ ID NO: 240997 - RNA, 41 nt, Homo sapiens
gagcaaggaggaaaacacacgagaaccacgagcaacccaaa

SEQ ID NO: 240998 - RNA, 90 nt, Homo sapiens
cagagagagagagaagagaggagagcagcagcgaaccaacccaagacacgcagaccccaccaagaggcggagcgacccggcccaaggacc

SEQ ID NO: 240999 - RNA, 55 nt, Homo sapiens
ccgaccccccggcgccgcgccggcggcggggacaccggggaaggaggccagacgg

SEQ ID NO: 241000 - RNA, 54 nt, Homo sapiens
acacgcacgcccgcccgccacgacccccgggcaggaaggaacggcaccgaggca

SEQ ID NO: 241001 - RNA, 59 nt, Homo sapiens
cagcgcggacccggagcgacaagcgccccgacggagcgccaggacggcaaccaagggca

SEQ ID NO: 241002 - RNA, 80 nt, Homo sapiens
ggggacgcccgggagaggccgcggcggccaggccccagacacagacgagcaggggaagggacccgagaggggcggggaga

SEQ ID NO: 241003 - RNA, 73 nt, Homo sapiens
gaacaaggaggccgacccgaacgccacaaggaaaagggcccaaagcaacgcaaggagcagcaagagaagcaag

SEQ ID NO: 241004 - RNA, 78 nt, Homo sapiens
cccccccaggacaacccagaggcaacaaaggcgagggaaagggagcagcaccggccacacccacagcacgaccggaac

SEQ ID NO: 241005 - RNA, 106 nt, Homo sapiens
ggagaggcggccagaagaaaacgaggggcggaacacccgccaaagcagagaaaaggaggccccgaaggagcaaggaaacgcgaaccaagggccacggggagacaag

SEQ ID NO: 241006 - RNA, 80 nt, Homo sapiens
ccgaagcagccgggagccggagcgggcgcggacgccgaggcaccgaggcaccagaggagggagcaccgcggacgccccag

SEQ ID NO: 241007 - RNA, 76 nt, Homo sapiens
cggccggcagggggcacccgcggccggcccggggccccgggaccggcgcccccccgaacaggacagagccacgacc

SEQ ID NO: 241008 - RNA, 80 nt, Homo sapiens
gaagagggaagacacgcggaaacagggaccgacgaggagggccaagaacccggaggagagcaggccggacacgcacagca

SEQ ID NO: 241009 - RNA, 51 nt, Homo sapiens
gacacagcggaccagggaagaacgaagaccccaaggacggcgaagacccaa

SEQ ID NO: 241010 - RNA, 66 nt, Homo sapiens
ccgccgaagaagcacgaaagccccacccgccgcagcaagcagaggaaggccgcggacccccccccc

SEQ ID NO: 241011 - RNA, 56 nt, Homo sapiens
ccaggcaccaccggccccggaagggccgggggcagccccccacccagcaccgcgca

SEQ ID NO: 241012 - RNA, 77 nt, Homo sapiens
aaaaaggccagaaagaggagcagagacgccggacagggagagagcgaacgagagcacgaaagagaggagaagaggaa

SEQ ID NO: 241013 - RNA, 87 nt, Homo sapiens
gcacgccaggccggccgcacgggcacggaggccaaagagacaacaagaaggaccgaggcagcacaggagggagcaggaaaaaggcgg

SEQ ID NO: 241014 - RNA, 78 nt, Homo sapiens
agagccggaccaggagaacggcggcggagaacagacccccaagagcgaccccaccgccagcaacccgccgccaggacc

SEQ ID NO: 241015 - RNA, 63 nt, Homo sapiens
ggcacagcgacccggaggagagagcaagaagaagccacacacagaagacccaaagagaacaca

SEQ ID NO: 241016 - RNA, 83 nt, Homo sapiens
cagcgaaggggaagaggaggagaagcccagcccgcaaaggccagggaccacaacagacaaagaacagaaaaagaaagccagag

SEQ ID NO: 241017 - RNA, 65 nt, Homo sapiens
cccacaccccggaccgagggacgcgggaaaagacccagagccggaccccggaggggcccccccgc

SEQ ID NO: 241018 - RNA, 70 nt, Homo sapiens
ggagcgggccaggccgggagcacccagccaaacccaggcccgagaagaagaggaaaacccaccaccgaac

SEQ ID NO: 241019 - RNA, 76 nt, Homo sapiens
gggcggcggacacaagcaggacgccccacacacgcaaaccaggcgagacagcaggagcaccaaaccccaccaaaac

SEQ ID NO: 241020 - RNA, 82 nt, Homo sapiens
cccggaccgcaggagggagaccccagcaagacgccaggccccggaagccagaaagggccagaagcccccaggaggagaacga

SEQ ID NO: 241021 - RNA, 69 nt, Homo sapiens
cgaagagaacaagaaaaagccgcaagcaaggcccaggaagcaggaagacaccgccagaagcaccaggac

SEQ ID NO: 241022 - RNA, 81 nt, Homo sapiens
cggaccgcccgcgcggggcacgaggaacagggaagggcgcgagcggggacaaagccccgccccccaaagcgaagccaaagc

SEQ ID NO: 241023 - RNA, 81 nt, Homo sapiens
aggcgacgcggggccaggcaggacccaacgacaggcgccccggcccaacggccaaacgaccaagaaagcgggacgcggaaa

SEQ ID NO: 241024 - RNA, 76 nt, Homo sapiens
agcccggaccagccaagccccaacggcccccgcgccgggcgcagcggccgagagaggggcccaggccggggaacgg

SEQ ID NO: 241025 - RNA, 75 nt, Homo sapiens
agagggacccaagacgcaccgacgccaagggagcggaaccacaaagagacaggccaaaacagaagaggcaaagcc

SEQ ID NO: 241026 - RNA, 58 nt, Homo sapiens
gcaaaaacaagccagggacccacgacacacgggaggcaccgccccaacccccccccgc

SEQ ID NO: 241027 - RNA, 66 nt, Homo sapiens
gagcagggcccaaaagaacagagagaggggcggcaaccccgaccccgcccgcaaggacaggacaac

SEQ ID NO: 241028 - RNA, 73 nt, Homo sapiens
ggagaggagaagagagcggcggaagggaaaaaagacccacaggcgaagaacaaaagcgaagcccaggagcaag

SEQ ID NO: 241029 - RNA, 86 nt, Homo sapiens
cagagcgaggcagagggggcccagagccgggcgccacccgaggacaagaagcaacccaggcacccccaacaggcacccacccccgg

SEQ ID NO: 241030 - RNA, 67 nt, Homo sapiens
aaccaagcacaaagaccagaaaggccacagagaaagacgccccaacacggaccgcaagagcccgacc

SEQ ID NO: 241031 - RNA, 74 nt, Homo sapiens
accaggaccacccaacgccgcagggcgcccccaccgcgcacgccgccaacaagaagccaccaggagagaacgcc

SEQ ID NO: 241032 - RNA, 78 nt, Homo sapiens
aggagccgcccgcccagaacggcggaccggaggaaccaggacacggcagacaccaagggcacagggggccaaggaacg

SEQ ID NO: 241033 - RNA, 44 nt, Homo sapiens
gcgcaccagggccggagacagggagcggcagcccagccccagga

SEQ ID NO: 241034 - RNA, 78 nt, Homo sapiens
gaaggcggcggcccggccgcagcggcaacagaacgaaaaacagggcggaaaagccgggccacagaagcaccaccacaa

SEQ ID NO: 241035 - RNA, 71 nt, Homo sapiens
cgagccccgggcgggcccagaccaggccccaaccacccccagcgagagagaggccaaccccggcccagccg

SEQ ID NO: 241036 - RNA, 91 nt, Homo sapiens
gagggcgaggcggcgcggccaggccaccccggggagccaaccaggaaggggcaggaccagcgcccggcaggcgccacgcgccgcagaccga

SEQ ID NO: 241037 - RNA, 75 nt, Homo sapiens
agccagggaaccacggagcacgagaaaacggcgggacaagagagggcggcagaaggaacaccgagaaaccgcaca

SEQ ID NO: 241038 - RNA, 86 nt, Homo sapiens
gcagccaccccgccgagacccgccgcccggccgccccgaacgcccacggccggcagcgcccaaaagggccaccgggccaggagcgg

SEQ ID NO: 241039 - RNA, 77 nt, Homo sapiens
ggaaagaaccagcgcagacaggcaaggaggacagcacggagccacaccccccaagcgcgcagcggcaggcgcaggca

SEQ ID NO: 241040 - RNA, 74 nt, Homo sapiens
gccgccccgcggccaacagagccggcaggccccgggcacgcggcggacagcgagaggaaccccagcgcggcccc

SEQ ID NO: 241041 - RNA, 79 nt, Homo sapiens
agacggggcgccccacagaggggcgacggaccaaccaagaagcgaagaaaagagaaagaaacagacaagcgagagagca

SEQ ID NO: 241042 - RNA, 76 nt, Homo sapiens
gaaaccaccaagagcaaggaagagaccaagcaccaagaaaacgccaaggaacgagggagaacaagaccaagaggaa

SEQ ID NO: 241043 - RNA, 37 nt, Homo sapiens
gcggagaaggaggggaggacaggcggacaggaaggga

SEQ ID NO: 241044 - RNA, 74 nt, Homo sapiens
aaacaggcggcggcggggggagcgggaagagaggacgccgagaggaaggcccacccaggggacaccgggcccag

SEQ ID NO: 241045 - RNA, 75 nt, Homo sapiens
gagcagcgggagagacaccaccaaaggggaaaagaaacaaacaacaagaagaaggacaaggaacgaaggcaagga

SEQ ID NO: 241046 - RNA, 77 nt, Homo sapiens
aaggcgcaacgcggcgcgcccagaacgcaagcaggcaccccagcccaaagaggacagagggagcgccgcgccgcggc

SEQ ID NO: 241047 - RNA, 74 nt, Homo sapiens
gaacgggggccccgaaaaaagagagggggggaccgaccgcaacagaacggacccggcgccagagcgcgaggggg

SEQ ID NO: 241048 - RNA, 67 nt, Homo sapiens
cgcagagagaggcgcagaaggaccgggagcacagccgccgaaaaggcacccgaaaggggaaggaaaa

SEQ ID NO: 241049 - RNA, 87 nt, Homo sapiens
cgcacagccccccagcaccacaggccccacaccccaccaaacccgaccagcggacccggccaacacacgcggaacccaggaaaccgc

SEQ ID NO: 241050 - RNA, 53 nt, Homo sapiens
aacaaggaagggacaacacgaccacccaaaacagggagccgaagggaaccccg

SEQ ID NO: 241051 - RNA, 81 nt, Homo sapiens
ggaggcccggccgccccggagggagacgcgcgccgaggagaacccagcggggaaacggcgagggggccccaaaggccagga

SEQ ID NO: 241052 - RNA, 76 nt, Homo sapiens
gaggcagcggaggcaagagaagacagcggaggaagaaaacgcagcgccccagcaccagggaaaaaggagaagaagg

SEQ ID NO: 241053 - RNA, 55 nt, Homo sapiens
cagcacaggaagcccaagaagcaagagacgaaggcgggggagcgggaggagccag

SEQ ID NO: 241054 - RNA, 85 nt, Homo sapiens
gcgcccacggcgaggaagcagccaagaaaaaaagacgaaagaagaagaagagcaaagggcccgcaggaccgggagcagagccagc

SEQ ID NO: 241055 - RNA, 90 nt, Homo sapiens
acgcggccgagacaaaggcaccaggccaccacagaaacaaaagcaacaaagagggacacacagcaacgaagcaggggaggagggaagacc

SEQ ID NO: 241056 - RNA, 78 nt, Homo sapiens
gagggccaacagcacgccgcgacgggacacggcccaagacacagccggagaggagagagggaagaagcaaaacgcggg

SEQ ID NO: 241057 - RNA, 72 nt, Homo sapiens
cacccagagccgccaccagggggagaccgaagagcgcaaaaaccgaaaccgcccacggcacagaaggaagac

SEQ ID NO: 241058 - RNA, 55 nt, Homo sapiens
cggagaaaacccggaaccgcgacggcggcagagacaccagccccagccgaaaagc

SEQ ID NO: 241059 - RNA, 80 nt, Homo sapiens
gggaccaggcgaagcggccgagcaggcgagcgaacgacgggaaagacaaggagccgggccgagaaaccgaaccagagacc

SEQ ID NO: 241060 - RNA, 71 nt, Homo sapiens
cgccacgcgcggaaggcagcgcccagcagcgcaggaaccgaggagcaaggaccgggagaaacgagaccaag

SEQ ID NO: 241061 - RNA, 83 nt, Homo sapiens
ccgagcccagcccccagaaaggaggacaacgggacccagaagaggagacgacaccaagaggaaaaaccaggcaaggaagcaca

SEQ ID NO: 241062 - RNA, 71 nt, Homo sapiens
aaaaggcagagagcacaggagacccggagacaggacaagaaaaccccaggacacagagcggggagcccgaa

SEQ ID NO: 241063 - RNA, 76 nt, Homo sapiens
agacagaggagggccaccaagcaagggacggcacccgagggcgcggcgaagggacggcgcacacgggccgccggcc

SEQ ID NO: 241064 - RNA, 62 nt, Homo sapiens
caggacgaccgcgccgcccagcacgccagggagcccgcaccaaggggccgcggcaaggacag

SEQ ID NO: 241065 - RNA, 81 nt, Homo sapiens
agcgccgcggcagccggggagcgcaggaaccagacgggggcgagcgagcaccgagcaacacacgcaggacaggaagaacga

SEQ ID NO: 241066 - RNA, 67 nt, Homo sapiens
ggaccagaaaaccaaaaaccacaagacaacgcaagaaaaaaaaacagagggaacggagccaccggcc

SEQ ID NO: 241067 - RNA, 64 nt, Homo sapiens
gccgcgcgcgaccaaaggagagcccaaaaggaagccggcgaggaaacacgccaaccagcagagc

SEQ ID NO: 241068 - RNA, 67 nt, Homo sapiens
gcggcgccaccggcacaccgaggcccaaaggcaggcccggcaccgaggccgaaacccaaggggcgca

SEQ ID NO: 241069 - RNA, 95 nt, Homo sapiens
acacagacagaggccggagcagagggaagcaaggcaaggcaaaggacccagaggagggcccaccggaccgggccacagaggcagaaaccagcagg

SEQ ID NO: 241070 - RNA, 90 nt, Homo sapiens
ggcggagcccaagccccagcccccgggcgaggcacaccccggagccaggagggaggaccgcgccaacaggacgaggagaccgaccaggag

SEQ ID NO: 241071 - RNA, 55 nt, Homo sapiens
acgcaagacaccggcacgcaacagggggggccgcccgcccaaggcaggaagaggg

SEQ ID NO: 241072 - RNA, 80 nt, Homo sapiens
gaaaagggagcgaggaccaggaagcacaaagggaccccagccgacgaaccacggaggaaccagacgccgcaggcccacgc

SEQ ID NO: 241073 - RNA, 68 nt, Homo sapiens
acaccccggccaccgacccacaaggagagaagaagagcccccaagcaccacggagggggagagcacgc

SEQ ID NO: 241074 - RNA, 92 nt, Homo sapiens
agaagcgcaacgcagagcgggaagggcagaggaagagcgagcggcgcacaaggagccaccaccagacagagcggaaaaggggaagaggcaga

SEQ ID NO: 241075 - RNA, 78 nt, Homo sapiens
caagaagaccccaacagcaaaccggggcccccccaggacacaggagcaagggggagacaccgccgcagcgaagcgacc

SEQ ID NO: 241076 - RNA, 82 nt, Homo sapiens
gaagggcaccacgacccgaaggcggagcagccgagaacgagccaaccaggaaacgaagcacccgccccacgaaaagaacaag

SEQ ID NO: 241077 - RNA, 71 nt, Homo sapiens
aggaccaagaaccaggcgcccagagcagccaccaaaagccaagccgaccggggccaaacgcaagggccgca

SEQ ID NO: 241078 - RNA, 60 nt, Homo sapiens
cgcacagccaggacaccggaaccgggaaaggacaggacgccgcgccaagaagcagcgggg

SEQ ID NO: 241079 - RNA, 79 nt, Homo sapiens
gaccgcggggcaccagcgcgcccagggagaagccaaaggccagggagggaggagggcggcacgaagcgagagccacgag

SEQ ID NO: 241080 - RNA, 71 nt, Homo sapiens
gacgaagcgccaggacggagcgaggacccacccgcaccggagcaggcaaggcaggaggaacagaagggcgc

SEQ ID NO: 241081 - RNA, 77 nt, Homo sapiens
ccaaaaccagcagaccacagacccacagcgaaagcaacagccaaggaagaagaaaaaaaaaggagaagaaaaaggag

SEQ ID NO: 241082 - RNA, 82 nt, Homo sapiens
gcgcgaaggccgggacccggccccggcccacaggggggggcaaacccgagagaacggcacgcgcgggaaaaaaccccagcaa

SEQ ID NO: 241083 - RNA, 75 nt, Homo sapiens
ggccgcagcagcagggacacgaagcgagcgccgagggcggagaacggaaaagcaccaggaagcagagaggaccgc

SEQ ID NO: 241084 - RNA, 71 nt, Homo sapiens
ccaaccacagagacaggcgacagcccggaccgccacccgaaccgcacgggaccggggaaggagaaccccga

SEQ ID NO: 241085 - RNA, 69 nt, Homo sapiens
aaccagcaaagaaggcagcacgggggcaaacaacacggaggaaaccaccgagcccgagcagccaaaaga

SEQ ID NO: 241086 - RNA, 71 nt, Homo sapiens
agaaaaagcgaaccaggcccggaccagcccgggcgcccgcacggacccccaaccggggcgagacacccacc

SEQ ID NO: 241087 - RNA, 65 nt, Homo sapiens
ccaggaccaggggccccaggcaaagaacaggagacaagggcgggcccccggcagggacaaaggcg

SEQ ID NO: 241088 - RNA, 65 nt, Homo sapiens
ccgacccaaaaagaaaacaccgaaggcacggaacggaaacagaggcggaggcggccgggcgaaaa

SEQ ID NO: 241089 - RNA, 68 nt, Homo sapiens
cagagggaaaaaagagaggagcgaacgagacagaacaggaaaaagggcagggcggagggagaagaggc

SEQ ID NO: 241090 - RNA, 33 nt, Homo sapiens
ggcggaccgcacaagcaggaaagcgcaaagccg

SEQ ID NO: 241091 - RNA, 91 nt, Homo sapiens
agaagaggaagaagaccaaggcccaccagccccagggcccgcaccccacagaaaacgggccaagaacaccgagagaggacagaaagcagcg

SEQ ID NO: 241092 - RNA, 73 nt, Homo sapiens
aaaaaagagcaggggaaaaggaaagaacgggaagaagaagaaggcgaagaagcacaacaccaccaaacaacac

SEQ ID NO: 241093 - RNA, 81 nt, Homo sapiens
caaccccaccggccgacagccgcgacggcgagcccgggccgcgcccgagagcagaagccggaaggccgcgaaggacggcac

SEQ ID NO: 241094 - RNA, 79 nt, Homo sapiens
aaacggccaacccaccgcgccgaaagaagaaagaggagaggagaggcccagagaggaagcacaaagaggagaagaaaga

SEQ ID NO: 241095 - RNA, 71 nt, Homo sapiens
gggcacccccgcacgcgccaccgccccgccagcaagaagagcccagccagaagaaaacgaaacggaggagg

SEQ ID NO: 241096 - RNA, 46 nt, Homo sapiens
aaggaccaagaaccagaggaaggaggcgaccacagaagaaggaaac

SEQ ID NO: 241097 - RNA, 94 nt, Homo sapiens
ggaccgagcggagaggagagcacacggcaccgagggaggaaacccaccagagaaggcgcggccacccaggacccgggggaggcagcgaagaaaa

SEQ ID NO: 241098 - RNA, 36 nt, Homo sapiens
gccccgcgggggacgaaccagacaaagcagaggaac

SEQ ID NO: 241099 - RNA, 92 nt, Homo sapiens
gcaggaagacgcagaggaaacggcagcagaacgcacagaccccacaggccccggacacgggccacaccccgccccacaccacccaacaccaa

SEQ ID NO: 241100 - RNA, 67 nt, Homo sapiens
aaggagggagccaaaggggagggaagggcaacaacccaccgggggaaacaccagacgaagccaagga

SEQ ID NO: 241101 - RNA, 82 nt, Homo sapiens
aaaaagcgaaggggaggcgccgcaagcgcgaggcaacgaagcaagagccccacacaccaagaacccgaaaaggaaagaagac

SEQ ID NO: 241102 - RNA, 69 nt, Homo sapiens
aaggaggcgggagaagaacacgaaaacgacagaaaacggggacggacccaggccaggaaagaaagaacc

SEQ ID NO: 241103 - RNA, 76 nt, Homo sapiens
ggggggagcacaggccggcggggggcggacaccagccaagcagcggaacgacagaggccccaagacgcagagaagc

SEQ ID NO: 241104 - RNA, 63 nt, Homo sapiens
gggacagagggagaagacagaaaggaaagaagaaagcaccccgcaaaagaagggaaagaacca

SEQ ID NO: 241105 - RNA, 78 nt, Homo sapiens
ggcgagagccccggcacccccggaccgaccagggcagacccagggacgaccacgaaaaaagagggaccaaaacgcacg

SEQ ID NO: 241106 - RNA, 46 nt, Homo sapiens
cgcccgcgccgccagcgccgcccccgccaacagaggccaacaccac

SEQ ID NO: 241107 - RNA, 94 nt, Homo sapiens
caaggagaacccccagggaagcagaaggagcagcccacagcaaacgccaggcaggcgggcgccaccgccacccgcagcgagggcggagccggcc

SEQ ID NO: 241108 - RNA, 60 nt, Homo sapiens
acaagacggagacaggaggggggggccacacacccacagccaggaggccagagaggagcc

SEQ ID NO: 241109 - RNA, 65 nt, Homo sapiens
ggcaccaggccaccacagaaacaaaagcaacaaagaggacaccgccagaagcaccaggacagcca

SEQ ID NO: 241110 - RNA, 70 nt, Homo sapiens
aggaggccgcaggaccaaaagacgcgcaaggcggggacggaaaggacagaagcagggaacgcggccccac

SEQ ID NO: 241111 - RNA, 72 nt, Homo sapiens
ggaagcagcagccaggaagcagcagcggagaaacacaacggcacaggagaaaaccccaaaaacaagcgcccc

SEQ ID NO: 241112 - RNA, 69 nt, Homo sapiens
ccacgagaagcgggcccaggacaagacagaagagaagaccacagaaacagccaaccccaggcagggcag

SEQ ID NO: 241113 - RNA, 65 nt, Homo sapiens
acgccgagcggccgcgccgaccaccacccggcaccacgaggaccgaagcccaaggaaccacgggc

SEQ ID NO: 241114 - RNA, 68 nt, Homo sapiens
gaaaaacagcccgaacgcaaggcagcaaaccagggaggggccaaagggagagggacaacacacgagca

SEQ ID NO: 241115 - RNA, 57 nt, Homo sapiens
cgaccccccgaccaccgccgacccaccgcggcagacacggcccgggcaaacagcaga

SEQ ID NO: 241116 - RNA, 71 nt, Homo sapiens
gccacggccggcaaggggcggaaccccgcccagcgaggcacaaacaaagggaggggagcaggaaagggcca

SEQ ID NO: 241117 - RNA, 80 nt, Homo sapiens
cagcgggggggcgcgggagcaacgggaggccggacccagcgagcgggcggcacgcacgcagggaccagccggccggagcg

SEQ ID NO: 241118 - RNA, 89 nt, Homo sapiens
cccgggcggggcagagcagcccccagccagccgcgcacgagaagagaagcccagagcaaaacaccccaaaccagaccaccgacgccggg

SEQ ID NO: 241119 - RNA, 66 nt, Homo sapiens
ccacggacggcacagcccgaccggccgcgagagggagaagaaaccaagccccagccggaaaccaga

SEQ ID NO: 241120 - RNA, 72 nt, Homo sapiens
cccccgacagcccgggccgagaaggccaaccagcacggacaccccaaccccgacacaccgggaggcacgcag

SEQ ID NO: 241121 - RNA, 72 nt, Homo sapiens
agggcagcaccgcagaggacccaaagcagcagaccacaccaggaccgcagaggaagagaggccgccagcgcg

SEQ ID NO: 241122 - RNA, 84 nt, Homo sapiens
gaagaggcggccggcaagagcggcggagcgcaggggagaaccggaagagaaacgcccaggccaaagaagagaacggggcacaca

SEQ ID NO: 241123 - RNA, 77 nt, Homo sapiens
cgggcaggcccccgcagcaggacaacccgaacaagcgaggcgaagccgacgagcccgaacagacgcaccagcgggag

SEQ ID NO: 241124 - RNA, 92 nt, Homo sapiens
aggacggcccaggccagggccacgcaccccggccgcccgggcagccacccccggcccgcgccacagcagaggccacaagaggaagcgaagaa

SEQ ID NO: 241125 - RNA, 54 nt, Homo sapiens
aggcgcgccacccccggcaccacacgggacacaagccgcaacaggaggagcgac

SEQ ID NO: 241126 - RNA, 78 nt, Homo sapiens
gcgcacccggcgcggcgcgcccccgccgcccgccgcgccccggggccggcccgcagccgaaaagacgaggcgaggagg

SEQ ID NO: 241127 - RNA, 108 nt, Homo sapiens
ccgaagcagccgggagccggagcgggcgcggacgccgaggcaccgaggcaccagaggagacaagcagaccggaagaccgacggaagaccacaccccgagggagcccag

SEQ ID NO: 241128 - RNA, 75 nt, Homo sapiens
aaccacggagcccccgaggcagcgagagagaagccaaaagcagggacgcggacaaaggggcaaaggccaagaaag

SEQ ID NO: 241129 - RNA, 73 nt, Homo sapiens
gccggacccgcccagcagaagaagagaggagggagaacacagaaaccggccccagaccacccaagaagaccaa

SEQ ID NO: 241130 - RNA, 85 nt, Homo sapiens
gggaaaggaggagcggagacagagaggaccgagcgcgggcaggcgggaggcaacggagcaccagccgaccaacgggagccgcaag

SEQ ID NO: 241131 - RNA, 71 nt, Homo sapiens
aaaaggacaaccaccaggacacagaaagaagcaaagccagggagggaaccgaagccacgggcgggggacgc

SEQ ID NO: 241132 - RNA, 46 nt, Homo sapiens
gaagccagcacgagggacgagggaaggcaagaggcgcgcacagacg

SEQ ID NO: 241133 - RNA, 86 nt, Homo sapiens
cgccaccaccacagagccacaaaacacagggagggccccgagaacccgaagacccaaccgcggcacacagaaaacccggacccacc

SEQ ID NO: 241134 - RNA, 64 nt, Homo sapiens
acccacggaacgcccaccacgggacacggagaacccccccaccaccggaaggcccgggcagaga

SEQ ID NO: 241135 - RNA, 81 nt, Homo sapiens
ggccgcgccaggcgggggcccagaagagccaggaacgaaagccaggaacaaccacccggcccaaggccgagaaacagacaa

SEQ ID NO: 241136 - RNA, 73 nt, Homo sapiens
agcccccgagagcggggacagggacgggacgagacccacagcagacagaggcagcaacaacacggcgaagagg

SEQ ID NO: 241137 - RNA, 82 nt, Homo sapiens
ggaaggggccagcggagacagcaagccccacgacggcaggcgcacggaacagcgaggccagcaggagacggagccacggagc

SEQ ID NO: 241138 - RNA, 80 nt, Homo sapiens
gaacggcggcgacaaggggcccgaacagaggggcgccggcggcagagcggggagacgagacaaccgccccgccgccggga

SEQ ID NO: 241139 - RNA, 82 nt, Homo sapiens
gcaccaaagcagccgcccccgcagccccgacaaggaagcagaggcagcaggccggccgggggggcaggcgaaccagggccca

SEQ ID NO: 241140 - RNA, 73 nt, Homo sapiens
ccgaggaaggaccagaagaacaacagcaaaagcacacaagcaccgggacccaggacggcggaggcggggggac

SEQ ID NO: 241141 - RNA, 77 nt, Homo sapiens
gcaacagagaccggagaaacgaccgaaacccaagggcggggaaaggcagcggcaagaccaacaagagacgagaaaac

SEQ ID NO: 241142 - RNA, 76 nt, Homo sapiens
accagaggaagagaggacaccgacagagcaccagaggaggacgagaaggacacgacgggagacagcagccaaagaa

SEQ ID NO: 241143 - RNA, 64 nt, Homo sapiens
ccggaacccgggccccgccaagaccacacacaaaaccacccgggaaccacacgggaacccccca

SEQ ID NO: 241144 - RNA, 62 nt, Homo sapiens
acaaacccggcccggggacccacgcggaggccgcaagcacgggcccagacgcagacaaacga

SEQ ID NO: 241145 - RNA, 84 nt, Homo sapiens
agacccagccccgggcgccccggagagcaaggacgcgggggagcagaggggagcgaccccaacgcaaagagaaaggcggggggc

SEQ ID NO: 241146 - RNA, 72 nt, Homo sapiens
aacagaagggcaaagcaagccgacaggacaccccaggcccagcagcaaacagcaggaaaaacagagaaaagc

SEQ ID NO: 241147 - RNA, 74 nt, Homo sapiens
aagcccgcacagcaggccaagacggaaagcagaggacccagcaaagaccccgcgaggcaagacaagaccaggca

SEQ ID NO: 241148 - RNA, 71 nt, Homo sapiens
gccacgacccaccagagaagagaagcgaggccggagggaagcagccacccacagccacagcagcagagggg

SEQ ID NO: 241149 - RNA, 90 nt, Homo sapiens
cggggcaccacagagagcgggggacggcaaaacagaacagaaaggcggagaaaaaagagggggaaaagaccacgagaagacaggccggga

SEQ ID NO: 241150 - RNA, 58 nt, Homo sapiens
aaagcccaagccaaagcgcaacaggcaaaccaggagggcgaagaggacagcagaccac

SEQ ID NO: 241151 - RNA, 83 nt, Homo sapiens
aaggcaacaggcccagaaacgcggaaccggccaagggaaagggcccaagcggcacggggaaaaagaccgagaagcgcagaccc

SEQ ID NO: 241152 - RNA, 72 nt, Homo sapiens
gcaaaaccgggaggcacagccccagaaacgcccagagccagaaggcaaaagaacacaggcacagaagcggca

SEQ ID NO: 241153 - RNA, 85 nt, Homo sapiens
ggacccagcacgaggaggcgcgaggagaggaaaaagccccaacgaagagaaagggaccgagagagaaaccaaggaaaggagaaag

SEQ ID NO: 241154 - RNA, 58 nt, Homo sapiens
aaggccggcgcggaggaggggagcagcgcgcaaggcgcggcaagcaaaaaagcaagcg

SEQ ID NO: 241155 - RNA, 76 nt, Homo sapiens
gccaccagccaggcccgagcgccaggaggaggaagaccgaccgccgccgcgcaccgcgaacagcacaccgagcaag

SEQ ID NO: 241156 - RNA, 71 nt, Homo sapiens
ggaccgccgacaccggagagaggacagcccaggccaagacagcagccacgaggaaaaagaaggggaaggaa

SEQ ID NO: 241157 - RNA, 80 nt, Homo sapiens
gccgcccccggagggcccacgcagcgccggacaagaaggcaggccccgaagccccagaacaagccagaagagcaaaccac

SEQ ID NO: 241158 - RNA, 64 nt, Homo sapiens
aaacgcccccaacccagcgcaaaggaagaggaaggagcgggcgggagaaggcaagcaggagaag

SEQ ID NO: 241159 - RNA, 68 nt, Homo sapiens
gaaggaccaagaaccaggggaacaaaggccgacaaagaacacaaggggaaagagaaaagagcaccaga

SEQ ID NO: 241160 - RNA, 59 nt, Homo sapiens
aaggagggaacacagacccagccgccaaggaagaagaggagaacgaacggagaccaaga

SEQ ID NO: 241161 - RNA, 73 nt, Homo sapiens
ggaacaccccgggaagcgccggggaagcagaagcacagggcacgccaacccagggacagacaaacagcggaaa

SEQ ID NO: 241162 - RNA, 83 nt, Homo sapiens
cagccgagcgacggccccaggcggagaccggcgaccaaccccgagccacccccgcaagaccacgggcagccaccccccggcag

SEQ ID NO: 241163 - RNA, 77 nt, Homo sapiens
ggcagcgggccagacccaggaccgcgacacaagagcaggaacgagagggggagcaggggaccaacccaaaacagaac

SEQ ID NO: 241164 - RNA, 80 nt, Homo sapiens
gccgcgagaaagcaaaagaggagcaagaacagaagaccggggaccagaagggagaagaagcaaaaggaaccacccaaaag

SEQ ID NO: 241165 - RNA, 79 nt, Homo sapiens
ccgcgcgcgaggagaggagcgcaacagcagcaccagggggaggacagagccaccaaagcagacagcacggaagaaggag

SEQ ID NO: 241166 - RNA, 72 nt, Homo sapiens
gaagcccacacacgccagcagaccaccccgggagggaggcagaagccaaaccgaccacagacacaaggacaa

SEQ ID NO: 241167 - RNA, 130 nt, Homo sapiens
aaaaaccaggagacacaaacagaaaaggaagaaagggacaaagagaggagcagcgaaccagccggccgacgaggagcagggcccccggacgcacaccacaagcgacgacgcaccgaagccgaccagaaga

SEQ ID NO: 241168 - RNA, 86 nt, Homo sapiens
ccgccccggagggagacgcgcgccgaggagaacccagcgggacaagaagagcaccccggggaaacaaagcccgagcagcccggacc

SEQ ID NO: 241169 - RNA, 66 nt, Homo sapiens
cgaggcgaagcaagcacacaacaaacagaacgcaaaggaccgaagaggggcgccggagaggagacg

SEQ ID NO: 241170 - RNA, 83 nt, Homo sapiens
ggaaccgcccggcagcaggccagacgcagacagaccaagcccgaagggcaaggggggggggcacgcgcgcacaacgacccagg

SEQ ID NO: 241171 - RNA, 37 nt, Homo sapiens
caagacccaccagcgcaacagaaacccacggacggcc

SEQ ID NO: 241172 - RNA, 79 nt, Homo sapiens
gagggcaacggaaccaggaaagaagaccgaggaaacggcagcccaaacccgcccccaggccccgccagaagagaccgac

SEQ ID NO: 241173 - RNA, 56 nt, Homo sapiens
acacacaaccagcgaaaaggcgaaaacacacaggagcgcaagacgggaggaacggg

SEQ ID NO: 241174 - RNA, 74 nt, Homo sapiens
ggaccaacaccacaagcaaagagagggagagaacacaagagacggaaaaggaagggaaggagccgacaccacaa

SEQ ID NO: 241175 - RNA, 76 nt, Homo sapiens
ccgaccgagacgggcggagaggagaaggaagaaagggcaggcgagagagggggaacaggaccaacggaacaacaca

SEQ ID NO: 241176 - RNA, 73 nt, Homo sapiens
cagaccggcaccgaagacccccccgggagaggcaggaggcagacccaagagcacaagggacccaacacagaag

SEQ ID NO: 241177 - RNA, 82 nt, Homo sapiens
aggggacggaggccaaacacgcagaggccgacgggagaggcccagcaccgcaaggccgagaaaggaaaagaaaacagggcac

SEQ ID NO: 241178 - RNA, 43 nt, Homo sapiens
ccagaccaggaaagacagggagggggccagccagcagaaacag

SEQ ID NO: 241179 - RNA, 60 nt, Homo sapiens
cgcgcccacggccagacccagggaggacaccaggagaacgaagcaaaagcgggccgggac

SEQ ID NO: 241180 - RNA, 82 nt, Homo sapiens
ggcgaccgcagggacggcagacccgagcaagacgccaggaccggaagcagagaaaggagagagagaacccggcgagaggaag

SEQ ID NO: 241181 - RNA, 36 nt, Homo sapiens
aacaccaccaccaaggagcacaggccacggcgaaag

SEQ ID NO: 241182 - RNA, 77 nt, Homo sapiens
cagcccccgagcagcgggacacagacgaagaacggaagcgccccagaggagagggcggagagacggagaaaacgcag

SEQ ID NO: 241183 - RNA, 77 nt, Homo sapiens
aagaaccccagaacaagcaaagaagggaaaccaggacagcgacaggacgaggaaagccccaggaagaagaagaagcc

SEQ ID NO: 241184 - RNA, 85 nt, Homo sapiens
aggccccagcggggggggaagcggaggcacgggcggcccgcaggaccggaccgggggagaggaagcagaccagcccacacagagc

SEQ ID NO: 241185 - RNA, 71 nt, Homo sapiens
ccgcggccaccccggaagggccgccggcggcgggaaacacaaagaagacaccagaagggccagcaccacga

SEQ ID NO: 241186 - RNA, 79 nt, Homo sapiens
aggcagcgacagccacacaacggacagccaacacacggagcacagagagacccaagagaagggccagaagagagaaaac

SEQ ID NO: 241187 - RNA, 72 nt, Homo sapiens
cccaaggcgacgaccgacaggggggaaagaccacccaagaagaccaaggcccaaaaggacccaagagagaag

SEQ ID NO: 241188 - RNA, 55 nt, Homo sapiens
agaggcaccacagcagcgggaggaaaccggagcgggcggagaacggaaaagcacc

SEQ ID NO: 241189 - RNA, 79 nt, Homo sapiens
caaaccgacagaagagcggaaacacaggacagagagaaagaagcgagaccaggcccccacaaaaccaggaggccaagcc

SEQ ID NO: 241190 - RNA, 80 nt, Homo sapiens
gcgaccagcgccagcgcagccgccagcgccggaaagcgggaacccacaacgaaggaaggaacagaggcacagcgacgcaa

SEQ ID NO: 241191 - RNA, 71 nt, Homo sapiens
gaagaaggaacaaaggccacagagcgaccgaaggaacaagcacacagagacggggacggcaacaacaacaa

SEQ ID NO: 241192 - RNA, 35 nt, Homo sapiens
gcgcgggaacggcgcggaaggcaggggaggcagaa

SEQ ID NO: 241193 - RNA, 89 nt, Homo sapiens
gagaaagagaagagaagagaaaggcccggagacgaaagggccgagaaagaagagaggaagaagaggaggaggaggaagaggaggaagac

SEQ ID NO: 241194 - RNA, 66 nt, Homo sapiens
accagaaaaagggcccagaccagacagcccagaacggacggcgggggccaggcaaacccagggacc

SEQ ID NO: 241195 - RNA, 71 nt, Homo sapiens
ggaaacaccaaaggggagccaacagacagacagcgacccaaaaaacgcaaaacgagcaagagaaacgcaag

SEQ ID NO: 241196 - RNA, 81 nt, Homo sapiens
aacaaaaggccaccgaagagggagaacaaaacaggggagccagaaggaccagcagggccggcaacaccccaacacgggcag

SEQ ID NO: 241197 - RNA, 84 nt, Homo sapiens
aggagaacaccgcaagcgagaggaccgggaccagccacggagcgcgccccagaccaccggcagggaacagccgagcagaccgag

SEQ ID NO: 241198 - RNA, 80 nt, Homo sapiens
accgcgcgcgaggagaggagcgcaacagcagcaccaggagcgcccccgagggaagcaaggggccgagaacaagaagagaa

SEQ ID NO: 241199 - RNA, 82 nt, Homo sapiens
ccacagccgccgcagacccagcagccaagagggaagcagacgagagcaaggcgagcacacagagaggggaagggcagcagca

SEQ ID NO: 241200 - RNA, 68 nt, Homo sapiens
cccccggaagcaccaggagccacagacgaccggcacacagcagagaggccagcgcccagaacccccgc

SEQ ID NO: 241201 - RNA, 82 nt, Homo sapiens
cgaaaggggagacaggcggccacaggcaaacaacacccaacagcccaaagcaaaggagcaacagcccaggagaaaacgggag

SEQ ID NO: 241202 - RNA, 72 nt, Homo sapiens
ggaggcaggggcagaaacagagaaggaacagaacagagagaagggcgggagaaaccaaggaaagagaaaagc

SEQ ID NO: 241203 - RNA, 59 nt, Homo sapiens
aggaagaccgagacggccagggcgcagaagccgggccgaaaaggaaaaccaagaaggga

SEQ ID NO: 241204 - RNA, 77 nt, Homo sapiens
aagccccgcagaaggaaagggaaacgcagaggcagaaaccaggaaacacaaaccagggagggaggacacaaaaaaac

SEQ ID NO: 241205 - RNA, 82 nt, Homo sapiens
aagccaaaaaagcccaggaagaagacgaggagagccgagagcgccggaggaccacacccggccacagccgcaggaacaagag

SEQ ID NO: 241206 - RNA, 81 nt, Homo sapiens
cggacgccggagaggcaccggaccggcgaacgcaagaggagccacggccacccagaacaccccgggggaaggaagagaaga

SEQ ID NO: 241207 - RNA, 76 nt, Homo sapiens
cgacggaccgggaaggagcacccaggaccaccagaacgagacagagaagacggaagaggcaaaccaccagagagcg

SEQ ID NO: 241208 - RNA, 78 nt, Homo sapiens
ccaagagcagcccacaggggggccgacacaagagcgcgagaccaacagggaagagcgccagagaacagcacaacgggc

SEQ ID NO: 241209 - RNA, 76 nt, Homo sapiens
ggcaccaacggcggcgagcgcccgggaaccccaggcccgggggcacaaggggcagacgaacagaaaagacgaacga

SEQ ID NO: 241210 - RNA, 70 nt, Homo sapiens
gagacaggccccggcaccaggcccggaagcacagcagggaaagcacagagagcaagccccaaagcagaga

SEQ ID NO: 241211 - RNA, 80 nt, Homo sapiens
cgggggggagggggcccggcaggacgaggacgaaggccgaggaagaagacggcacgggacccccagcacaggcagcaggc

SEQ ID NO: 241212 - RNA, 79 nt, Homo sapiens
cggacggaagacacggcgcaaaccaggccaggagagagacaagagagggcggcagaaggaacaccgagaaaccgcacac

SEQ ID NO: 241213 - RNA, 74 nt, Homo sapiens
ggaaggcggcaaccgaagccaaagccggagcaccgaggcccaggcaagaggaaccagccagagcagagcaggac

SEQ ID NO: 241214 - RNA, 76 nt, Homo sapiens
cagggggagaaggacggacccccaggcgccacccgggcaggaaccacagagaacagcccggacacgcgcaccccga

SEQ ID NO: 241215 - RNA, 79 nt, Homo sapiens
accaaaagaagacaagggccggcccagggagaacgcaaaaccaccacccccacaaaaaacgcagggagaaaaggacgca

SEQ ID NO: 241216 - RNA, 82 nt, Homo sapiens
cggccgggcccaggcccccccaaaaaggcacaaacccagcacagagaagacggcgacaagcaaaagacgacgcagaaaggag

SEQ ID NO: 241217 - RNA, 77 nt, Homo sapiens
gcgcaaccagcgcgcccagcaacagcggcagagccgggcaaggaacacgcccgaacacgagaaccaagcagaaggaa

SEQ ID NO: 241218 - RNA, 89 nt, Homo sapiens
caggcccgccgcccccgccaagcccgaagagccaaccacaggagggaaaccacgcaggcaaacgagaaaaagccgagaaggccagacgg

SEQ ID NO: 241219 - RNA, 67 nt, Homo sapiens
acccaagcaaggcgagagagcaaggaccggcaaaaacaacaagccaacacaaccaggacaagccgag

SEQ ID NO: 241220 - RNA, 83 nt, Homo sapiens
cccgcaaaagcgagagagccacagggcagaagaaaagaaccggggaagcggcgagccacaccgccaaccaaaacagaaacagc

SEQ ID NO: 241221 - RNA, 69 nt, Homo sapiens
ggcagcggccgcccggggagacagcaggggaccgggcaaggggccgaagaagacaagaggcacacagag

SEQ ID NO: 241222 - RNA, 94 nt, Homo sapiens
gcgagcccggggagcaaaaaaaagaaggagaaggaaaaggcccaggggcaggaaaagaaaagaaaaggccaggggaggccaagcaaagcaaaac

SEQ ID NO: 241223 - RNA, 55 nt, Homo sapiens
caagcaggaccacccaccagccaccaggggccgcaaggccaggcgcgcagaggca

SEQ ID NO: 241224 - RNA, 92 nt, Homo sapiens
cccgaggaccagacccccagcgacgagccgagaagcccacagaagcccggcgagagaagaagagcaaagagggcagcccggaagggacaaac

SEQ ID NO: 241225 - RNA, 82 nt, Homo sapiens
cgaggagcgagcgcgcgaggggcggccgagggaaagggagcagcaccggccacacccacagcacgaccggaacccagcgacc

SEQ ID NO: 241226 - RNA, 77 nt, Homo sapiens
ccgacagccgcagaacgaacccgagccggaccagcgagcaggggagccagaccaaagacagccgaagaaaacgaccg

SEQ ID NO: 241227 - RNA, 79 nt, Homo sapiens
acaacaggcagacagacaaaacgaccaggaaaagggggaccaaggccacaaaaggaagagagagggcgggcgaagccag

SEQ ID NO: 241228 - RNA, 70 nt, Homo sapiens
aacgaaccaggacggcaagacgccgccggcaaaaaggcaaaaagagcgcgaagagacggagcagaagggg

SEQ ID NO: 241229 - RNA, 49 nt, Homo sapiens
cagcagcagcagcaacagcaacagcagcagcagcaacaacagcagcagc

SEQ ID NO: 241230 - RNA, 80 nt, Homo sapiens
ggaaacagcaagcgaagccgaaaaagcgcccgagacgggcccgccgaaagaagggaaaagggacccaaagcccaaagaga

SEQ ID NO: 241231 - RNA, 79 nt, Homo sapiens
gcgcggggacccgacgcccgcacggcgaccaagcaaaaggggggcgcggcccagccgcgcgcacacagcaagaagcaag

SEQ ID NO: 241232 - RNA, 83 nt, Homo sapiens
gagaaggagcacgacagcgagggaaagcacgaagggagcccagcgacacaccagcagcagccaaagaccaaccagccccgagg

SEQ ID NO: 241233 - RNA, 74 nt, Homo sapiens
aaccaacacacaaagccgcagaaagcagcagcaaaccccccagagcccgaccgggagccacgacaaggacaccg

SEQ ID NO: 241234 - RNA, 70 nt, Homo sapiens
gagaaaacacaaaccgaaaggaaagacccaaaccagcaaaggagacacagaaccccgcaaccgaaagccc

SEQ ID NO: 241235 - RNA, 83 nt, Homo sapiens
gagaaaaacagaaggaagacaagccaggccagacgacgccggccacccagaagccggagcacaaggaacgcaaggcggggaaa

SEQ ID NO: 241236 - RNA, 74 nt, Homo sapiens
ggaaagagagaaccaagccaggaaaggaagaaacccaacaaaaaacgggaagccaccagggaggacagccaaga

SEQ ID NO: 241237 - RNA, 74 nt, Homo sapiens
cagcccagccagccgccaagaacgcagcagcagccgccaagacgggcacaagcccacgggggagcggcggggga

SEQ ID NO: 241238 - RNA, 88 nt, Homo sapiens
aaaggcggcgcccgaagaaggcaagagcagaggccccagaccgccaagaggcacagaggacgggacagaaggcaggccgggcagcccg

SEQ ID NO: 241239 - RNA, 74 nt, Homo sapiens
ccgcagagccggcagcagcccgacggccaggaggcgaagagacgaggaagcccaggagcccgaacacaaaaaga

SEQ ID NO: 241240 - RNA, 61 nt, Homo sapiens
ccccacacacgagaggaacgcgaggcacaagagggaccagacaggaggcccccccagcgcc

SEQ ID NO: 241241 - RNA, 60 nt, Homo sapiens
aaaaccagagaaacaagaggaggagggccagcaaggcacaccggggcggacggcgcccac

SEQ ID NO: 241242 - RNA, 71 nt, Homo sapiens
caggggggccggcagggacgcgacccccggacgacacaaaaaggacgcaagaggaggaaggcgggaaccag

SEQ ID NO: 241243 - RNA, 76 nt, Homo sapiens
gaagaggccagaaagccagacacacagagcaggagacagaacagacagaaaaaacaacaagaaacccacaaccaag

SEQ ID NO: 241244 - RNA, 94 nt, Homo sapiens
cgcgcaggaggacggagcccaaccgcaacccgcgccgcgccgcgccgcgccgccggaaccaaaaagaagccccagagccggggccaggagcccc

SEQ ID NO: 241245 - RNA, 80 nt, Homo sapiens
ccggcggccgcggaagcggggcgcacaccaccggacaaccgacaaaagggagccgccaccaaaagcagacggaaaaccca

SEQ ID NO: 241246 - RNA, 51 nt, Homo sapiens
gaaccaagggcaacaggaaggcgcaaggaaagggcagaaacacagaaaaag

SEQ ID NO: 241247 - RNA, 74 nt, Homo sapiens
aaacccccggaggaaaccggcagaccccagacccaaacaacggcagaagcaggcgagcccaccagaccgcccgg

SEQ ID NO: 241248 - RNA, 73 nt, Homo sapiens
aaaaacagccacccagaccagccccaggggaacagggcggagaacggaaaagcaccaggaagcagagaggacc

SEQ ID NO: 241249 - RNA, 80 nt, Homo sapiens
gcgccccgcagacggcgggggcacgacagcgcaaggaggccgcacccaaggccgcagacaaggcccggcagggcagagac

SEQ ID NO: 241250 - RNA, 73 nt, Homo sapiens
accacgcccggaagggaaagaggcgagcccacacaaggggaaggacaagaaaacgaagagggccaaaaaaaaa

SEQ ID NO: 241251 - RNA, 73 nt, Homo sapiens
caacagcaacaggaccgaccggcagcgaaagagccacccgcagcgaaggagagcacagcgcggagccagcgcc

SEQ ID NO: 241252 - RNA, 70 nt, Homo sapiens
acgcaggcacgccgccgaaaagacaaaaccggccacggcgcggcacaggcgccggaggcgccccggaaca

SEQ ID NO: 241253 - RNA, 74 nt, Homo sapiens
agcaggcaggcggggaaaagagaaagagaagaaacagagaccgccggcacaagacaacaggaccccccagaaac

SEQ ID NO: 241254 - RNA, 89 nt, Homo sapiens
cggccggggcacgaggcagagggcgcaccgcccgggacggccacagacccacagaggcaccccagacacaacgggcggaccccggcaaa

SEQ ID NO: 241255 - RNA, 75 nt, Homo sapiens
gggcccgcggcgagggaaagccgcacccaagccacagaaggaggcaagcggagacaggcaccgggcacaggggga

SEQ ID NO: 241256 - RNA, 73 nt, Homo sapiens
cacgcgcccggcgcccagcccaccagcacggcagcaaaggccccgccggccaccccgcggaagcaagaccgga

SEQ ID NO: 241257 - RNA, 72 nt, Homo sapiens
caaagccaagaggcggccaaggggacgagcaaaggaagcgcgaacagcagcgcaggagggaaaagaagaccg

SEQ ID NO: 241258 - RNA, 78 nt, Homo sapiens
cggagaggacacgcccagggcacccaagaaacagcagcaaggaacgcgcagccagcaccacagggccgggccagcgcc

SEQ ID NO: 241259 - RNA, 83 nt, Homo sapiens
cagccgcaccacgagagccgagccggaggaggaccccaagagggggagcgggggagagccaggcgcccaacccagagccacgg

SEQ ID NO: 241260 - RNA, 73 nt, Homo sapiens
ggagccacacgcccagcagccaccaacacccaaagacgacgacaacagggagacggacccaggagcgcgacag

SEQ ID NO: 241261 - RNA, 42 nt, Homo sapiens
gagcgccgccccccgcacaaggcacaacgcagacacaacgcc

SEQ ID NO: 241262 - RNA, 85 nt, Homo sapiens
agccagacagcggaggaggaaccgaaccaggaccaggccccaagcccgaggcccagaggaggagagggacgaggccaccgcggcc

SEQ ID NO: 241263 - RNA, 76 nt, Homo sapiens
gccacccacccagaccccacagccacggacagagggagacgggccgccgcaaccgagccccaagcgggcagagcag

SEQ ID NO: 241264 - RNA, 73 nt, Homo sapiens
agcccaggccaagagcacagggagaagaaaagaaacgcaccgggaacgaagacacaggccgagaaacagacaa

SEQ ID NO: 241265 - RNA, 82 nt, Homo sapiens
ccgcgccagcaccacgcccgcgccgcgccgccgccaccagcccaagagaaagggaccaccacacgaaaccaaggaaaaaccg

SEQ ID NO: 241266 - RNA, 98 nt, Homo sapiens
ccaagcgcagccaggcggagagaggcgccccgcagcccccaagcaggaagccaccgacaagagcacagggaaggggaagacgcagcccacaagaagcg

SEQ ID NO: 241267 - RNA, 36 nt, Homo sapiens
cccagggagccaaaaaggacacacgaaacacaaagg

SEQ ID NO: 241268 - RNA, 76 nt, Homo sapiens
cgagcacacagaggaacagaacgcaagcaaaagcgaggaaaaggagcagccagggacacgccaccacaccgaccca

SEQ ID NO: 241269 - RNA, 66 nt, Homo sapiens
aaccccgggaccgagcagcgcaccggaggcagcgccccaaaaagcccggacagcaagacaccgggc

SEQ ID NO: 241270 - RNA, 77 nt, Homo sapiens
cggccggggccggggcgccgccgggcggccgggcgcggcgagcccaggacccgagacagaaggccaaagagacagca

SEQ ID NO: 241271 - RNA, 47 nt, Homo sapiens
aagccgcacgcacgcaacccccaggcgggaaaaccgccacaaagccc

SEQ ID NO: 241272 - RNA, 89 nt, Homo sapiens
ggcgagcacagcaggcaccgccgcacccgccggagagccggccggggcaacgcgaaaccaagcgggcggccgagccgggaagccaacca

SEQ ID NO: 241273 - RNA, 72 nt, Homo sapiens
agagcaccaacagccccaacccagaaagcagaggccagagcggagacagacgcaccagcagacggaacaacg

SEQ ID NO: 241274 - RNA, 72 nt, Homo sapiens
aaagcaggaagagcaccaaaaacgaaaccgaagcagaagggcccagggccgaaaagaaaacaggagaaccac

SEQ ID NO: 241275 - RNA, 94 nt, Homo sapiens
cgaaccccaaggccaacagagagaagagaccagaagcgcgcccagacgccagacacgggaccaagcagacaaaccgacaggaaacaagagagac

SEQ ID NO: 241276 - RNA, 69 nt, Homo sapiens
cggcgcccggacgcgaggggggaggagcaaacgaaaaacggaaaagaaggaaggcaagccccacaggag

SEQ ID NO: 241277 - RNA, 72 nt, Homo sapiens
agcagagcgagcgcccacacggggcaagcacagaaaagcaccaagcggaaaacgagacgaaggacaagggac

SEQ ID NO: 241278 - RNA, 76 nt, Homo sapiens
agaaaaggacagcagaggcagagagcgcagggagaagaaacgaacggaacgaggagagcacgagagcgccggcccc

SEQ ID NO: 241279 - RNA, 74 nt, Homo sapiens
ggcagacaaaagggccaaagaagggagagaggcaagggcagcaggaaagacgagaccgggcacgccaacaaccg

SEQ ID NO: 241280 - RNA, 75 nt, Homo sapiens
gcaccacgggcaggaaggcagcgcacgacagcaaaagggcagagcggcgggaaaccaccaacaacacccccaaac

SEQ ID NO: 241281 - RNA, 81 nt, Homo sapiens
ccgacacggccgacagcacgcacgggaccagagcgccgcgcaccgcagccgcgcccggggaccgagacccgacgagagaga

SEQ ID NO: 241282 - RNA, 83 nt, Homo sapiens
cagaagggccccgcaacacaggaaaacagagaaagaaggaaggagggccgaggccgcggaagaccagcgggagcccacgccgc

SEQ ID NO: 241283 - RNA, 60 nt, Homo sapiens
gagaaccaaggccaagaccagaaccagcccgggaaaggagacagacccagcacggacccc

SEQ ID NO: 241284 - RNA, 60 nt, Homo sapiens
gaaacgggcgaagcgacgagccgcgaggagggacaagcaaggggccaaggagccaaggag

SEQ ID NO: 241285 - RNA, 69 nt, Homo sapiens
caccaggggcagacccagccggcagcagccaggcggagaacaacaaacaggccacagcggaacaagcgc

SEQ ID NO: 241286 - RNA, 65 nt, Homo sapiens
ccggggcagcccccccggaaccgggcacaggcccaggcgcaagacaaggcccgcgggccaagaca

SEQ ID NO: 241287 - RNA, 75 nt, Homo sapiens
aagaggcgcacagcccggacacccaaggggacaggacgggacgggagcgaaggaagaaccggaaaaaagaacccc

SEQ ID NO: 241288 - RNA, 73 nt, Homo sapiens
gccagaagaagaagaaacccagcaaaaggaaaaaagagaggcccaaagaaagagccgcagacgcacagcaacc

SEQ ID NO: 241289 - RNA, 36 nt, Homo sapiens
aagcccccaaggcaagaagcggaagccaagcgcaca

SEQ ID NO: 241290 - RNA, 80 nt, Homo sapiens
gcccgcggggcgccaggcacgcgaggcccccagcacggcccaaagaagagcaggccaaggaacaagaagagaaacgaagc

SEQ ID NO: 241291 - RNA, 78 nt, Homo sapiens
agaaggaccggaagcacacaacaggaaaacaaaagaggagaaagcccaggaccgggggccgggcgaggaggccgggag

SEQ ID NO: 241292 - RNA, 70 nt, Homo sapiens
gccagggccaggcggcacaccccccaagaccggcggcccaacccaccggaacggccgagcgaccaggaga

SEQ ID NO: 241293 - RNA, 84 nt, Homo sapiens
ggaaacccagcggcccagccggacaggacccagaccagccaaagagaagaagaaaggaagcaaaacaaagaaaaaaaaaaaccc

SEQ ID NO: 241294 - RNA, 79 nt, Homo sapiens
cacaccacgacaccgaaaacccaccgagcccgccaaagaccgaggaagccgacaggaccgggggcacggaggggaagca

SEQ ID NO: 241295 - RNA, 77 nt, Homo sapiens
gagcgggccgggaccaggacggggcgaaccgagcaccaggaggcgaaccgcgagcccagaaggcgagggacgaggaa

SEQ ID NO: 241296 - RNA, 53 nt, Homo sapiens
cacagccacaccagccaaaggaggcagcgcaggcaccccccgacagcggagac

SEQ ID NO: 241297 - RNA, 77 nt, Homo sapiens
gacgcccagcccggcgcacggcccagaaagcaagcggaccacacccgcgggagaagggcccgcgacgaaggcaacca

SEQ ID NO: 241298 - RNA, 69 nt, Homo sapiens
cggccggcgccgcccggaccgccaggaggcagaaacaggcgccaaacccggaagagacaagagcacaag

SEQ ID NO: 241299 - RNA, 57 nt, Homo sapiens
gaggccccagcggaccgaacaggcccccagaccccaccaggcgcgcaaaaagcacca

SEQ ID NO: 241300 - RNA, 58 nt, Homo sapiens
acacgccggaaaccccgcccacagcacgagaccaagcaaggaaccagcgagcaaacgc

SEQ ID NO: 241301 - RNA, 85 nt, Homo sapiens
gaagggaacaagaggggcagcaagggccaagcgaacagcgcggagaacacaaggaagaaaagaaagcaagacaggcaaggaagag

SEQ ID NO: 241302 - RNA, 68 nt, Homo sapiens
caggcggccgccgcgccaccaccgggcgccgaggggcgacgaaacaacaggagaagacagaggagcca

SEQ ID NO: 241303 - RNA, 81 nt, Homo sapiens
gccccgcagcccagacggcggaccgaaggaggccgggaccacccagccagcggaagaagaaagcaccgggaggaaagagag

SEQ ID NO: 241304 - RNA, 65 nt, Homo sapiens
agacaagccccagggaagccacagcaccccagcacccagggcccaccgaaaagcgagaaaggccc

SEQ ID NO: 241305 - RNA, 83 nt, Homo sapiens
cccggggcccgcccggacacagccagacacaggacaagaggagcgcagaacaagaacccacaggagggccagaggacaaagca

SEQ ID NO: 241306 - RNA, 82 nt, Homo sapiens
gccggccacggccaggaagccgaggcccggacccccagggccgaggaaacaaggggaaccgggcccggcagcaaaggagaca

SEQ ID NO: 241307 - RNA, 83 nt, Homo sapiens
gggacgacgagacgacaccacaaaggcaccgccagggaggagagcggggcacgcgcccaacgcgcaagaagcccaccacggag

SEQ ID NO: 241308 - RNA, 74 nt, Homo sapiens
cgcccggacacggaccggacagagaagaacgcgacaaacaagccggagaacgcccagaccgaaaaccagaaaac

SEQ ID NO: 241309 - RNA, 56 nt, Homo sapiens
agcaagcccgccgacccgaaggaaacagcgggagcagcggagggggaaacagcaac

SEQ ID NO: 241310 - RNA, 55 nt, Homo sapiens
cacaaccaagagaaacaaccaccagacaaagggagcaccagccagaccgggaaga

SEQ ID NO: 241311 - RNA, 78 nt, Homo sapiens
cacggacccggcgacaacacccggccccgagacagaagccgagaaaaaaagaggcgaccagcccgggggaaaagaaga

SEQ ID NO: 241312 - RNA, 54 nt, Homo sapiens
caccacgcccgccccagcggagagaaacggcagacccaccgaccaacaaagaaa

SEQ ID NO: 241313 - RNA, 64 nt, Homo sapiens
cagcagaagaaaggagaagaaagcaaggacagcagggagaaggaagggaaaacgaagaaagaaa

SEQ ID NO: 241314 - RNA, 83 nt, Homo sapiens
ggagacccaggcgggacagagggagccaggcagaggagcagcagccggcccggcgccagcaggaaaacagaaggagccggggg

SEQ ID NO: 241315 - RNA, 68 nt, Homo sapiens
aaaaaaaccgcgaccggccgcccgcacaagccagaggccaacccaggaaaaaggcccaggaagacaaa

SEQ ID NO: 241316 - RNA, 71 nt, Homo sapiens
gggaggcaagcagagcgcggccaagaacagaggaagggagccccgcgacaagagaagcaccagaagacgca

SEQ ID NO: 241317 - RNA, 74 nt, Homo sapiens
gccagccggagaagcgagcagcggccacaagaccaggccagacagacaaggggaagcacgagagcaagaacacg

SEQ ID NO: 241318 - RNA, 57 nt, Homo sapiens
acacgccacgccaccagcggcaaggcgcccgcagacgcagaagaccgcagagccgcg

SEQ ID NO: 241319 - RNA, 63 nt, Homo sapiens
ggcagggggcaaacaagccgaccggaaaaaggcaaaacggacaaagaccgcaaaaagacccga

SEQ ID NO: 241320 - RNA, 79 nt, Homo sapiens
ccgggcccgcgcccggggccaggcccagggggcaagaccaaccagccggcacaccaggacccagcagccacaacgagcg

SEQ ID NO: 241321 - RNA, 94 nt, Homo sapiens
cggaaaacccagcgcccccgggccggcaggcgacccgaacgaaggcggcccggcgggccaccccacccccgggcgggcagacagacaggcaaca

SEQ ID NO: 241322 - RNA, 67 nt, Homo sapiens
agccggaggggcgaggggcagcgcgagagggaggccagcgagaaacggaagggaagaaagggcccac

SEQ ID NO: 241323 - RNA, 82 nt, Homo sapiens
gagcccggaagcgcagaagcgaggacagcagcggacggccggaccaagaggcgccgccccccagcaaacgagaaaaacccag

SEQ ID NO: 241324 - RNA, 80 nt, Homo sapiens
ccggaaccccccgggcgcccggagaccgcggggagccaaaagggaacgcggaaggacaggaagaaaagagaggcacccgg

SEQ ID NO: 241325 - RNA, 56 nt, Homo sapiens
cgcaggaagagcgaaaaaacaggaggacacaagacacgcaggaggccggggaacag

SEQ ID NO: 241326 - RNA, 79 nt, Homo sapiens
ggacagcaggacccaaggagagcagcggaggcgacgcgcccagaagggcaaagacaaccccacgcggcgcggcgagaac

SEQ ID NO: 241327 - RNA, 80 nt, Homo sapiens
cccgcaaccaccgccacgacggcgcacggcccggcggagcagggaccgccggggcgcgcggccccaggaggagccgccgc

SEQ ID NO: 241328 - RNA, 75 nt, Homo sapiens
aaagggacccaggaagagaagaaagaggacaacagacgggaagcgccaaagaagcgacgcgaaagaaagaaagaa

SEQ ID NO: 241329 - RNA, 42 nt, Homo sapiens
ggcacaccccggagccaggagggcgccggcggcagagcgggg

SEQ ID NO: 241330 - RNA, 84 nt, Homo sapiens
ggaggggccggggagcgcaggggcacgggcgcagcggccagggaaggaagcaaagcaaaggagaaggcagcgggacggacaggc

SEQ ID NO: 241331 - RNA, 35 nt, Homo sapiens
cagacccagagccaaagaaagacaaggcaaaagag

SEQ ID NO: 241332 - RNA, 37 nt, Homo sapiens
gacccagcgaggaggcaaaccaacacagcgggaaaga

SEQ ID NO: 241333 - RNA, 61 nt, Homo sapiens
agacacggccccccaaggaaaacagcaggggaaagcgcgagcgagcacccggagcagcaga

SEQ ID NO: 241334 - RNA, 38 nt, Homo sapiens
acgagcgaaaagacgggcggcgacggcggcgcgaggac

SEQ ID NO: 241335 - RNA, 81 nt, Homo sapiens
gccccggcacagcacgggcggcccagcgcgcccgcccagcagacgcgagggccccggagcggggagcggcaccccgccccg

SEQ ID NO: 241336 - RNA, 38 nt, Homo sapiens
ggacagagacccagagcgaggcagaaagggcacaggcc

SEQ ID NO: 241337 - RNA, 86 nt, Homo sapiens
cgcagcgggggggcgcgggagcaacgggaggccggacccagcgagcgggcggcacgcacgcagcgcagacgggacacggccggcca

SEQ ID NO: 241338 - RNA, 74 nt, Homo sapiens
cccccaaaaaggaaagacaccggcggggcacaccaaagggaaccaagaagggacccaaaaagacggacagccca

SEQ ID NO: 241339 - RNA, 37 nt, Homo sapiens
agcgcgaaacgcacgagaaggcccacacacgaggaag

SEQ ID NO: 241340 - RNA, 72 nt, Homo sapiens
acagcaccgcccgacccccagagaggcgagcacaaccgaccccagaccgcagagcaaacccggcagaaggca

SEQ ID NO: 241341 - RNA, 81 nt, Homo sapiens
ggaacaagcggaggacaccgagaccagcagccccagagaagacggcccagcagagcacccaaccagcgggaacacagcgcc

SEQ ID NO: 241342 - RNA, 68 nt, Homo sapiens
cggccggcggacccccggagccccggcgggggaggccaacagacccaacccagaaggcaccaaacgga

SEQ ID NO: 241343 - RNA, 73 nt, Homo sapiens
ccccgagaagcgggaacagagacacagcggaaacgcaaaagcgagaagaaaaagccagaggacaagaagaggc

SEQ ID NO: 241344 - RNA, 53 nt, Homo sapiens
ggggggccccagccccgagccggcgaacaagaagaaaggacgaagagagcaga

SEQ ID NO: 241345 - RNA, 61 nt, Homo sapiens
ggccgagggcccaccagaagaagcggagaaaagaagaagacacgcagaagaaggaaggaaa

SEQ ID NO: 241346 - RNA, 73 nt, Homo sapiens
cccaagggaaaagcagcggccgcaaggaacagagccgacaggcacgaagaaaaggaaaacccacgcgggggcg

SEQ ID NO: 241347 - RNA, 66 nt, Homo sapiens
acgagagaagccccccagggcacccgaggggggacagaggccaggaagcaggccgggcacgcagag

SEQ ID NO: 241348 - RNA, 70 nt, Homo sapiens
gcccccgggagcgggacacagaggggagaccaggaagggcaggaagcgcacccgacaggaaggaaagcga

SEQ ID NO: 241349 - RNA, 76 nt, Homo sapiens
gaccccccgaccaccgccgacccaccgcgggcggagaacggaaaagcaccaggaagcagagaggaccgcagaaggg

SEQ ID NO: 241350 - RNA, 70 nt, Homo sapiens
cgcagggcgcccccggcccaggcggccgagccgcgagaacaacggagacggcgcgccaagccaccaacac

SEQ ID NO: 241351 - RNA, 71 nt, Homo sapiens
cggggacccccgacgccaggcagcgcccccaaacgggccaggaacagcccaggaagaacaagaagaggggg

SEQ ID NO: 241352 - RNA, 73 nt, Homo sapiens
gaaccgaaacgcccggaaaggcggcggggaaccgagaggggaaagaaaaagagcccaccaaaaggaacagacg

SEQ ID NO: 241353 - RNA, 61 nt, Homo sapiens
aggcacggccacagaagcaacaaaggaccgcccccagagagagcgacgaaacgcaagaagc

SEQ ID NO: 241354 - RNA, 62 nt, Homo sapiens
aaccagggcggcaaaacgagcgggccagacagcccgacagcacgcccagccccgggaacgaa

SEQ ID NO: 241355 - RNA, 75 nt, Homo sapiens
gcggcggccggcgcaagccgacgagcaggagccgagccagcaggccggcgcaacaggagacgaacccagaccagc

SEQ ID NO: 241356 - RNA, 74 nt, Homo sapiens
aacagaacaacacagaggggccgaaaaacaagagggccgagaggaggggaaagcagagggagcccagaaagggc

SEQ ID NO: 241357 - RNA, 75 nt, Homo sapiens
ccacaacccagaaacccacacggcaagaaaagcaccgcccgagaaaagcaaaacacgacacgaaggcagagagga

SEQ ID NO: 241358 - RNA, 74 nt, Homo sapiens
aaaaaaaccacaaagcggccgaaacagaaaacaagagaccacagaagggggccgcagccggccaggggacccga

SEQ ID NO: 241359 - RNA, 80 nt, Homo sapiens
gagaaaaaggacaaaagccaagaggaggacagcgcacacagcaagcacgagcaaccggccgacccgccaaagcgccacac

SEQ ID NO: 241360 - RNA, 80 nt, Homo sapiens
gcagaacacgcgcgggaccccgggcacggcgcgcgggaggccgggcacgagccaagagaaggaaagaaacaagaccagcg

SEQ ID NO: 241361 - RNA, 82 nt, Homo sapiens
accccgcaggcgaccgaagacagcggaaaggaccagaagaggggcagccaggccggcccaacagaccccaacagggcccccg

SEQ ID NO: 241362 - RNA, 84 nt, Homo sapiens
gagagcaagagacgcacggaggcggcccgcccggaaggcaagcgcagcaacaacagagagcacgggggagaggccaaaggaacg

SEQ ID NO: 241363 - RNA, 74 nt, Homo sapiens
ggggcagggagagaagaccggccccacacgcaacccgaagacaccaggcaagcacacggccaagcggagaagac

SEQ ID NO: 241364 - RNA, 76 nt, Homo sapiens
gacccgagcggcacacaaccagaggaggccgcagccaccccccccacgcgcaccaccacgacacagaccaaacagg

SEQ ID NO: 241365 - RNA, 60 nt, Homo sapiens
gacgcaaggcgaggaggaagaacagaacagacccaggaaagcacagcagagcgacaggca

SEQ ID NO: 241366 - RNA, 71 nt, Homo sapiens
gcccaaaacgaaaccccaggagccccgaaacaggaccgaggagcggaaacccagaaaacaacaggaggagc

SEQ ID NO: 241367 - RNA, 81 nt, Homo sapiens
cggcgccggcccgggccgccagggcagaacaacaagaaccagccaccaggaccaccagggcgggccgaacagaagagcaga

SEQ ID NO: 241368 - RNA, 69 nt, Homo sapiens
acaaaccaaccaacggaaaacgcgccaccccaagcaccggcacagcaaaagaagggaaagaggaaaacc

SEQ ID NO: 241369 - RNA, 88 nt, Homo sapiens
gagagaaaaaagaagagagccaacgaaaggaagagggagcagagcaagaaaaaaaggaagacgagaccagagggcagaaaggacagga

SEQ ID NO: 241370 - RNA, 73 nt, Homo sapiens
gaaggcaaagaccccagcaccacagaaaaaaggagagagagagagagaggaagcgaagaaaaagcgccaggaa

SEQ ID NO: 241371 - RNA, 70 nt, Homo sapiens
aggaagcgcacccgacaggaaggaaagcgaaagagcggagaagacaacacaggaggcccgcccaaaccga

SEQ ID NO: 241372 - RNA, 76 nt, Homo sapiens
ggccagggaacaggcccgggggaagagccgcgacacgcggagacagagacgaaaaagaggaccgaaggacggcgcg

SEQ ID NO: 241373 - RNA, 76 nt, Homo sapiens
gccgaagccggcgcccagcccccaagcggcccgcgagcaaacgccgcggccccaggcacaccaggaccacagcagc

SEQ ID NO: 241374 - RNA, 71 nt, Homo sapiens
gaccaaaccggaaaccgccaaaaccccccacacaccccgccgggacgcaacaagcaaggcaaacagaaggg

SEQ ID NO: 241375 - RNA, 73 nt, Homo sapiens
aggagaaacccaagagcagcggcagcaaagcgggggagccccccgcccaaagcgcaccaggcaacaggaaaac

SEQ ID NO: 241376 - RNA, 71 nt, Homo sapiens
acgcggcagaaaagaagagggaaggggaagaggggcccgaagacaaggcgcccgcgaagagcccgcggccc

SEQ ID NO: 241377 - RNA, 60 nt, Homo sapiens
agcaacccgcggggacagggaaaaaaaggagcgggaggacccaggggggggcagccgccc

SEQ ID NO: 241378 - RNA, 79 nt, Homo sapiens
cccagccgacccccagccagcccaaaaaaacgcgccggacaagaagaggaggaaaagaagaagaaaaaaaggaaaagga

SEQ ID NO: 241379 - RNA, 74 nt, Homo sapiens
cacgccgaccccggcgccccaggcggccggacaacggcgcggcgacaagcacacacaacgaccaagccaaggac

SEQ ID NO: 241380 - RNA, 84 nt, Homo sapiens
cgcgggacacacccccaggaggcccggcagagcagggcaagaaggaacagacaaaaacggccggaaggaaacacaggacaccag

SEQ ID NO: 241381 - RNA, 79 nt, Homo sapiens
ggacgagacgcagaggaccaggggagcggacgcagacggagcgcgccccaccgcggccgccggggacacagagcccccg

SEQ ID NO: 241382 - RNA, 85 nt, Homo sapiens
ggacgagcggagaaggccacaccacgcagaacgcaacaccaaggcacaccaccccaggcgcggggaggcccagcccgccgcaggg

SEQ ID NO: 241383 - RNA, 61 nt, Homo sapiens
accaaaaggcccccccaccacaaagggacggaaaaggcgcacacgacccggagaaccccac

SEQ ID NO: 241384 - RNA, 79 nt, Homo sapiens
cgagcaaagagcgaaaccagagcaagcagggcaaaaggggaaaagacgagggaagaagaccgacaacaaccaggggaag

SEQ ID NO: 241385 - RNA, 68 nt, Homo sapiens
gccggggccaggaggggagaggggagaggcgcgcgaggaaaaggagagaaggacaacaaacgggccaa

SEQ ID NO: 241386 - RNA, 71 nt, Homo sapiens
ggaacagggaaggaacccgggcaaacaggaccacaggcccggaaaagccacaggccacacaaccgaaacca

SEQ ID NO: 241387 - RNA, 83 nt, Homo sapiens
gcgggagggcgaaaaaaaagaaggaacccaaagaaccaccccaaacaggagaggacggcgggcccggaaggaacgcccggaag

SEQ ID NO: 241388 - RNA, 78 nt, Homo sapiens
accggaacgcccaagccccaccgcgaggaacagcgccgagcgggccaaaacagagggaagcaagacgcagagcgccaa

SEQ ID NO: 241389 - RNA, 82 nt, Homo sapiens
gaaggccgaggcggccggccggcaccccacggaggagaacaccaaacagaggaacaggcggacagccaaggagacaaagaag

SEQ ID NO: 241390 - RNA, 83 nt, Homo sapiens
cgcgccgcaggagacgagaggacgggaccaggcgaagcggccgagcaggcgagcgaacgacggagggaagccggaaacccccc

SEQ ID NO: 241391 - RNA, 57 nt, Homo sapiens
cgccgcaacaaaagaaacccgggccgcggaaggcccgaaggccccagagaaggagaa

SEQ ID NO: 241392 - RNA, 59 nt, Homo sapiens
ggcgggcgccggagggaagagaggaggccaaggcagagcccccacacccaggcccagcc

SEQ ID NO: 241393 - RNA, 80 nt, Homo sapiens
agcgccccaggagaaacaaaacaggggcaaccgcgcaacggcgccggaggacagccgaggaggcccaccaccccagggag

SEQ ID NO: 241394 - RNA, 56 nt, Homo sapiens
accagcagcggaggcggacgcgcaggcgcgagggcggagaacggaaaagcaccagg

SEQ ID NO: 241395 - RNA, 79 nt, Homo sapiens
ggaccccgcgcacacgcccccgaagcggggacgcgggccggagccacggaagggggaaaggcgacaaagcaagaagaga

SEQ ID NO: 241396 - RNA, 73 nt, Homo sapiens
cgggcagccaccccgcccccgccccccccgccgcaccagaacaccccaccagaccacccagcaagcccacaaa

SEQ ID NO: 241397 - RNA, 45 nt, Homo sapiens
ggggagcaggcaacacagcacacaaagagaaagggaaagaagaaa

SEQ ID NO: 241398 - RNA, 77 nt, Homo sapiens
caccaggcaaggacgacgacccgaccacggcgggagggccagacaaggggaacacaagaggagagaaggggaccgca

SEQ ID NO: 241399 - RNA, 40 nt, Homo sapiens
ggaccaaagagagaacacaacagacaggaaagagagacaa

SEQ ID NO: 241400 - RNA, 69 nt, Homo sapiens
ccagggaagccgaagagccagaacaaaggagccggcagacagcaacacagggcagggcgagcccacagc

SEQ ID NO: 241401 - RNA, 60 nt, Homo sapiens
gccgacaaccccagaaacaggaaccagacgccgcaggcccacgcagcggaggcggggaaa

SEQ ID NO: 241402 - RNA, 78 nt, Homo sapiens
caagaggggggaggcgcacacaaacggcagcgcccggagaggaagaggcaagagggcggacggcagacaggcagcaac

SEQ ID NO: 241403 - RNA, 89 nt, Homo sapiens
gaagaccgggcgccagggccgccgccccgcccggggacccgagaaggaggcaaacagccggccagcaaaaggaaagggccggggagagc

SEQ ID NO: 241404 - RNA, 66 nt, Homo sapiens
aacagcaagaacccaaaaggggaaaccagcgaagaaagccgccggcgagagcacaaacgagcaagg

SEQ ID NO: 241405 - RNA, 90 nt, Homo sapiens
ggagacgagggaagaaagggcgggaaaagccacccacagggcgggcagcagcggcgcacaaaagcaggaaaggcagccgacaggggaaag

SEQ ID NO: 241406 - RNA, 78 nt, Homo sapiens
caaagggcccgcccaagagcgacagccccagaagcaagagaggaaaacagaagcgggcggccggggacacaagcaaca

SEQ ID NO: 241407 - RNA, 71 nt, Homo sapiens
gccgaaggaagcaccaacggaggaacgcagggccaggggcacccaaacaacaaaccgagggacaaggaccg

SEQ ID NO: 241408 - RNA, 88 nt, Homo sapiens
cgcagcggcgcagcccacgccagacgaccccacccgcgccgcgacccggggccagacccaagaggacgcagaggcgagcgcggagacc

SEQ ID NO: 241409 - RNA, 51 nt, Homo sapiens
cacgacgggccagacaggcacgcaggggcaggcgccggcgaaagcaacgaa

SEQ ID NO: 241410 - RNA, 80 nt, Homo sapiens
cccccgaacccccagcccaaacccggaaacccagcggcccagccgggaggggggaaggcaggcaggcaaacccacacgac

SEQ ID NO: 241411 - RNA, 73 nt, Homo sapiens
aggcggcagaggcgaaaacaaacaacgaaaaacaaagcaccgcgggagccacagggccaagacgccaagacag

SEQ ID NO: 241412 - RNA, 76 nt, Homo sapiens
cgaaccccggaggggaggcacaaaggacagcgagaaccccggcgcagcagcaccaggaaccggaggccggccggag

SEQ ID NO: 241413 - RNA, 71 nt, Homo sapiens
gcgccaccacaaccggaccaccccacacacagaccaaagcaccccagaccacacccagcacaaggcggccc

SEQ ID NO: 241414 - RNA, 73 nt, Homo sapiens
ggaggaaaaccgacgaagggggagggcgcagcccagagccgaccccagaccggagacccaagaagcagccgcc

SEQ ID NO: 241415 - RNA, 74 nt, Homo sapiens
caaagggaccccaaggaagaccagagggaagcgaaacaggccaagagaagcagcaagaagacacgaaaagaaaa

SEQ ID NO: 241416 - RNA, 77 nt, Homo sapiens
agcggcgaaggccaaggcaaagcgaagcacgaaccggcgcagccgacacaacagcgccgggaacggacgcagcgcgg

SEQ ID NO: 241417 - RNA, 79 nt, Homo sapiens
cccaccagacggagccccgaggagcaggaaaccacggcggagaacggaaaagcaccaggaagcagagaggaccgcagaa

SEQ ID NO: 241418 - RNA, 74 nt, Homo sapiens
cccaggccaagagggacccacccggcgggcgccagggaaggaccgcacacaagccgcaccggacacgcgcggag

SEQ ID NO: 241419 - RNA, 70 nt, Homo sapiens
ggggccgccacagcaggaagcggagacagagccagaaaaggaaaacgcaccagggggcacccgaggagga

SEQ ID NO: 241420 - RNA, 54 nt, Homo sapiens
ggcagagaaacaaagagcgcagagacagaggaacgaccaacacggagaagacca

SEQ ID NO: 241421 - RNA, 89 nt, Homo sapiens
aggccacccgcaacaccccagggcgcagcagcccggcggaagcgagcagcaccaggacgacggaggaaggggcagagagggacccgccc

SEQ ID NO: 241422 - RNA, 57 nt, Homo sapiens
ggggccagggaacccggcaccgccccaggaccagcgccaggaaacagagaccccaag

SEQ ID NO: 241423 - RNA, 69 nt, Homo sapiens
agaaccgacacccgcaccaacgaaaaaccaaaaggacaaaggacgggaggggaccaggaccaagcaagc

SEQ ID NO: 241424 - RNA, 81 nt, Homo sapiens
gaggaggagaccgcccaccgagacagccggagaagagcgaccagccacaagaacagagggagagcagcccaaaaaagcagg

SEQ ID NO: 241425 - RNA, 75 nt, Homo sapiens
aagagaggaagaaaggacagggagagaagccaagaaagacagaacggcacggccgccccgggcggacggggccgg

SEQ ID NO: 241426 - RNA, 57 nt, Homo sapiens
ggagcgaccccacgagaggagaggcccacggagaggccagagcgcccccgagaccca

SEQ ID NO: 241427 - RNA, 79 nt, Homo sapiens
gcccaggaaagcgagaaggcgaagagacgaggaaggagacaccagaagcgcaaagggaacggaagaccagaagacacca

SEQ ID NO: 241428 - RNA, 75 nt, Homo sapiens
cagaaccagcgcgacaaaaggcagggacccgggacaagacgccagaggaggcaacccaaggagaaccaaggaaca

SEQ ID NO: 241429 - RNA, 61 nt, Homo sapiens
caaggaagccacggcagacacacaacccgacccgacgaacgagagaaacgacaccaagaac

SEQ ID NO: 241430 - RNA, 80 nt, Homo sapiens
ccgcgggaagcaggacgcgccgcgccccaagaggcgaggggacggcggggagcgcaggacagacgcccccgcgagaccag

SEQ ID NO: 241431 - RNA, 63 nt, Homo sapiens
aaagagcgagaccgaggaggaggaaaaccaagcggagcaaagaggacgccggaccggccaccg

SEQ ID NO: 241432 - RNA, 99 nt, Homo sapiens
ggagcagcacggcacaagagaagcgccgaaggaagcagccacccgcccacaggcggaaaaaagacgacaagaaggagcgaacgagaagaaggcaacagg

SEQ ID NO: 241433 - RNA, 79 nt, Homo sapiens
ccacacgaggccgccagcagcgacaaacgcccacaaagcgacaacaggcacaaagagagaaggaacacccacagggcag

SEQ ID NO: 241434 - RNA, 72 nt, Homo sapiens
gagaaacgcaaccggaggcaaggaggccacggggccgaagacaccaaccgggcaccagccaaacggaacaaa

SEQ ID NO: 241435 - RNA, 83 nt, Homo sapiens
ccggggggagcgcggggcgacgcggcgcagggacccgggacagcggagagcccgacccaccccgccacaaacgcagcagggga

SEQ ID NO: 241436 - RNA, 74 nt, Homo sapiens
gaccagggccaggaaaaggggggaaggcacacaacgacccggacagcgaccgcaagaggaggagggaaccgccc

SEQ ID NO: 241437 - RNA, 81 nt, Homo sapiens
cccaacccccaagacgccaccgaggcccgcgggacagcgcccgcgccgaccccacggacgggccagcgagaggcagccagg

SEQ ID NO: 241438 - RNA, 77 nt, Homo sapiens
gacagggccgccgcgccggacgcagaaaacagacacacagcggagacaagcagggccggcaggaggcggggaagcgc

SEQ ID NO: 241439 - RNA, 79 nt, Homo sapiens
ggcgggcaggaaaccaccccgcgcaccgccgcaggcgaaggacacaccaaccaggaagacggcgggagggcccgaagga

SEQ ID NO: 241440 - RNA, 74 nt, Homo sapiens
ccagcaccgaacagaccccgccccagcagaagaggaggggcgccaccaggaaagggcggcaggccaaaccaaca

SEQ ID NO: 241441 - RNA, 74 nt, Homo sapiens
gaagaacacccagaagcgaaggaccacaggccacgccgggcagagcgacggcgacccccccaccacgcgcgccc

SEQ ID NO: 241442 - RNA, 79 nt, Homo sapiens
gcaacgagccgggcaaccgacagccaggagggaacacagaaaagcgacagccgaaacacggaaggcaaagaggaaccgg

SEQ ID NO: 241443 - RNA, 72 nt, Homo sapiens
ccgggcccaggcgacaacaccagaccagggcaagaccaaaacccaggaagcagcccgaaagaagcaaaccgg

SEQ ID NO: 241444 - RNA, 79 nt, Homo sapiens
acggccaacaagacgcacccgccaccgggaccgacgggcacgggggagagcaaagaccagccagaagaagcaaaaggaa

SEQ ID NO: 241445 - RNA, 121 nt, Homo sapiens
agaaggagcccagcagcagcagcccccagcgcccagccaaaccacgaggccacagcacaggcaaccaggaccagcccaacggggacccagcaggaccaagccagcccaccccccaacagac

SEQ ID NO: 241446 - RNA, 74 nt, Homo sapiens
caccagcagcccccagagcggaacacaggagacaggagaaacagccaagaagaaacccgccccggacaggacgc

SEQ ID NO: 241447 - RNA, 54 nt, Homo sapiens
cggccgagaaggcagaggcgaagaggagaaccacagggcggcggggaagacgag

SEQ ID NO: 241448 - RNA, 73 nt, Homo sapiens
ggccgcaccgccgccacgccacacccgcaacccgggcccgcgcacaagaacgagagccgagacaacccaacgg

SEQ ID NO: 241449 - RNA, 76 nt, Homo sapiens
caaaaggaaacaaaacagaagacaacaagcaagaggcgcaacagaacagcaacaggaaaaagccacgaggagcaaa

SEQ ID NO: 241450 - RNA, 77 nt, Homo sapiens
gggaaaggagcggggagccccgcgccacagaggacccgacagaaagcgaaaaaccaacacggggcccccccaccgaa

SEQ ID NO: 241451 - RNA, 72 nt, Homo sapiens
gaagagcgccccaggagaaacaagacagcagaccacagcccggcaggcccaaaaacccaaagggacagaagc

SEQ ID NO: 241452 - RNA, 79 nt, Homo sapiens
ccgaacccggaggaggcgaccgcggcgcagcgacccccgccaggcaaaaggaaggggccgggaaaaccacacggcaggc

SEQ ID NO: 241453 - RNA, 74 nt, Homo sapiens
agacgcgcacaagcacgggcaccgacccccaggccagggggccgcaccggggcgcgggccacgcgaccacccgg

SEQ ID NO: 241454 - RNA, 77 nt, Homo sapiens
cggccgcgcggcacccggccgcgggcggccgccgcgccgcccaggcccggaccagggacaggcggggaagaaagccg

SEQ ID NO: 241455 - RNA, 71 nt, Homo sapiens
agcgaggccggaaaccggcggcgccagccaccggagcaaccacaacccgcagaggagccaggaggagagaa

SEQ ID NO: 241456 - RNA, 73 nt, Homo sapiens
gaacaaacagaaacaaagcaggcaccaaggacagagcaggaccaaaagaagcaaacggcagggaaacgccccc

SEQ ID NO: 241457 - RNA, 72 nt, Homo sapiens
cgacacaccagcaccaaacggacacgcaagaggaaagcgcaggcaggagaaggacagcagagccacaaggga

SEQ ID NO: 241458 - RNA, 78 nt, Homo sapiens
caaccggagggcgagaaacgcaaaaaggggccagaggacacacacaagcccccaggacaagggaaggaacacgaaaag

SEQ ID NO: 241459 - RNA, 71 nt, Homo sapiens
gcagcaccagccgggagcaaaagcaccccgcaccaacgagaagagggacgaacagcggggacgccccagca

SEQ ID NO: 241460 - RNA, 68 nt, Homo sapiens
cggaccgcgaaggcgggggagacgaaaacacggagccaccaccaccccgagagacggaccggaccacc

SEQ ID NO: 241461 - RNA, 77 nt, Homo sapiens
ccgagagccgcccgggccagcggccgcgcacccccggccggaggcaccagcaacagaaaggccccggagcagcgcga

SEQ ID NO: 241462 - RNA, 101 nt, Homo sapiens
gcgcggccgcaagaggcagaccccagaacaccgaaaaggaaaccccaaaggggccgcaaaacggaaacggaggaaaaagcgcaaaggacagaaaaaaaagc

SEQ ID NO: 241463 - RNA, 72 nt, Homo sapiens
gacaggaaaaggccaaagcccgccaagaccggcccacgggcacgccaaaaccagaaacacaggaaggggaag

SEQ ID NO: 241464 - RNA, 86 nt, Homo sapiens
ccccaaagccgaacaggcagggccagacccagaagccaccgggccaagcacaacaccagagggcagcaggagcgcagggaggacag

SEQ ID NO: 241465 - RNA, 82 nt, Homo sapiens
aagaaggggagcagaagcagggcagacaagacccggagggcgagccggcaccagggcccagggaagacagccgccaccaggc

SEQ ID NO: 241466 - RNA, 67 nt, Homo sapiens
gaggggaaggggaaacccaaacaacacccgcaccgggcgccccgcagaccccgcgagcaaaggagga

SEQ ID NO: 241467 - RNA, 79 nt, Homo sapiens
ccggcggaccgcgcccaaaccagggcagaagcaggagcggaaggacggccaggagaccaggaagacacccaccagggac

SEQ ID NO: 241468 - RNA, 79 nt, Homo sapiens
gaagggagcggagcacgggcaaggcggagaggacggagcggcgagcccccgcggcgacagggcccacaggccacccgcc

SEQ ID NO: 241469 - RNA, 80 nt, Homo sapiens
cccggccccggcccacaggggggggcaaacccgagagaacggacagcaagaagcagcggcagcacgaacacagacgacca

SEQ ID NO: 241470 - RNA, 75 nt, Homo sapiens
cccacaggagccggacacgcagacagcaagggcccgccgcaggccgaggcagagacgggaagcggcaaacaaacg

SEQ ID NO: 241471 - RNA, 69 nt, Homo sapiens
acagaccaggcccaagcgaaaaagcgggaacgcaggacccaaagcgccgcgggaacgggaccaaaagga

SEQ ID NO: 241472 - RNA, 66 nt, Homo sapiens
gcgaagcggccgagcaggcgagcgaacgacgggagccaggcaggccaagcgcggcccgaggacggc

SEQ ID NO: 241473 - RNA, 82 nt, Homo sapiens
ggagcagagggacacaggcccacgcggcgcccggcgaccgggggggcgcggggggcaagcggggccccggcagacggacccc

SEQ ID NO: 241474 - RNA, 72 nt, Homo sapiens
agagcagcggaaagcagaccacaccagagaaaaagaaccccaggaacaaaaacaaagaaagaagaggagaca

SEQ ID NO: 241475 - RNA, 76 nt, Homo sapiens
gacggggcgccccacagaggggcgacggcacgagaagagaagcccagagcaaaacaccccaaaccagaccaccgac

SEQ ID NO: 241476 - RNA, 73 nt, Homo sapiens
gcagaagaggcacggaaaaaaggcaaagaccaagacaacggcaagaccccaaggcacaaaagaggaggaaaga

SEQ ID NO: 241477 - RNA, 64 nt, Homo sapiens
ccgcagaggacgcagcggagcgccccgcagcccgccaggaccagacccggcgggcaccacagca

SEQ ID NO: 241478 - RNA, 73 nt, Homo sapiens
gcccgcccccggcgcgcccagccagccggcccggccggacgaaagaagcaccaggggccggcagggggccaga

SEQ ID NO: 241479 - RNA, 51 nt, Homo sapiens
gccaaaacaaaagcaacaaggagaaagagcgcgcacgaaagcacacgaaaa

SEQ ID NO: 241480 - RNA, 70 nt, Homo sapiens
aaagggccaaagaagggagagagcccgaaggagggacccagacacccccgcagcacgcgaaggcacaggc

SEQ ID NO: 241481 - RNA, 87 nt, Homo sapiens
ccgcgacacaccgcacccacacgggcgagaagcccacgaggcaacacgcaaggccgccaccaggccacccaccccaccagagccgga

SEQ ID NO: 241482 - RNA, 57 nt, Homo sapiens
cggcccccaaaggcgagaacagagcgcgcgggggacaagcaaaaacggccagacaca

SEQ ID NO: 241483 - RNA, 72 nt, Homo sapiens
aaggaccaagaaccagccggcgggccgagaagaagcggagcaagcagaccgaggcacacccaacagaaagcc

SEQ ID NO: 241484 - RNA, 70 nt, Homo sapiens
gggagccagaagcacaggcccgggcgaaggggccacgcgagcaacaccgggcgcgcacagaagggacaac

SEQ ID NO: 241485 - RNA, 66 nt, Homo sapiens
caccccccaagaccggcggcccaacccaccggcaagcccgagaagcaagaccgccccaaaaagcaa

SEQ ID NO: 241486 - RNA, 70 nt, Homo sapiens
gcgccaccgacgccgcccaccggcacagcggaccccgcccgagacgcggcccagagaccccccacgggaa

SEQ ID NO: 241487 - RNA, 53 nt, Homo sapiens
acgcgccccgcggagacaggggcccgccacgggagagcgaaggcacgagcgcc

SEQ ID NO: 241488 - RNA, 81 nt, Homo sapiens
cggaccggcagggaggacaggccagggaggaaagaacagagaaaagccagcaaaaacagagggagccgccggcggcaaaag

SEQ ID NO: 241489 - RNA, 82 nt, Homo sapiens
gcggggcgcccacgagaggaccccacccggaaacccaccagagaaggcgcggccacccaggacccgggggaggcagcgaaga

SEQ ID NO: 241490 - RNA, 74 nt, Homo sapiens
cgggcacggacccaggacccccgcgggcgacgcgagcccagaacaagcaaagagcggcaggggcccggaggcac

SEQ ID NO: 241491 - RNA, 79 nt, Homo sapiens
cgcggcaaagcagaggagccgcagaaccacaggcgcagagccagaaggcaaacacaaccgcagcggcagagaacaacaa

SEQ ID NO: 241492 - RNA, 68 nt, Homo sapiens
gcaaggagcgagggaacagacacccccgagagaagaacggcacacaccccccagaacccgaagggaac

SEQ ID NO: 241493 - RNA, 75 nt, Homo sapiens
cacgcacgcgggcagggaacaggcggagcggaagaaaaacgccacaaccaaacgcgcaaagcgccaaacgaaaag

SEQ ID NO: 241494 - RNA, 72 nt, Homo sapiens
ccaaagacggaggagggcgcggaggagaggagcgagcccagggaaagaggagaaaaaccagaggcgggaaaa

SEQ ID NO: 241495 - RNA, 73 nt, Homo sapiens
ccaaccagaaaacaaagacaaaaggagacgagaagaagacaagagcacaacaacagcaacggaggcgggaccg

SEQ ID NO: 241496 - RNA, 74 nt, Homo sapiens
gaaagacggaccaaaaacaggaggaagcccagggaacggcgaaggcccagaagagaggacacacgaaaaggcgg

SEQ ID NO: 241497 - RNA, 111 nt, Homo sapiens
acgacaagaagcaccaaacagagacaaaggcgacgaaagaacacacgcgggagcaagggaaggaaacaaaacgacccgagcagagacaagggacgcgaagggcacagcagg

SEQ ID NO: 241498 - RNA, 76 nt, Homo sapiens
acccgccaccgggaccgacgggcacgggggagagccgccgcaaagaacaaggagagggacccaagccaggagcagc

SEQ ID NO: 241499 - RNA, 91 nt, Homo sapiens
cggaaaccgaaacggggaaaaaaaccgcagggcggagagaccaggaccaggacaaaaccccagaggaacggacaaagaaaccagaagaagg

SEQ ID NO: 241500 - RNA, 55 nt, Homo sapiens
gcaaacggagccaggcacaagaaaaagagccaaaccggcgccaagccccaacaca

SEQ ID NO: 241501 - RNA, 71 nt, Homo sapiens
ggaccgggaccagcaacacagaggaaaagaaagagggaaacgcagcagaggcaaaacaggaagaaggacga

SEQ ID NO: 241502 - RNA, 76 nt, Homo sapiens
aggcgagaaacgggaccgcaaagaacaggagcccacagaaggcagaggcagaaccacagacgaaaaagaggaagcc

SEQ ID NO: 241503 - RNA, 78 nt, Homo sapiens
aaacaccaagacaaaaacaaaggccgggccgagaacgaacagcacaccgacagagaacccaggccaacacacagacag

SEQ ID NO: 241504 - RNA, 62 nt, Homo sapiens
gaggacaaaaccgccaaagccggccccggcaaggaggaaggggcgccccaagcagagacgag

SEQ ID NO: 241505 - RNA, 74 nt, Homo sapiens
acggcgcggcagagccccgacgccacagaacggacaaaccggcgaccacacacggggacgacggggaagccgga

SEQ ID NO: 241506 - RNA, 63 nt, Homo sapiens
ggcgcgaaaaaaaagaaacccaggaagcggacagacgggcagcggccaagaacaggacgcggg

SEQ ID NO: 241507 - RNA, 82 nt, Homo sapiens
aggcacgaggccagcgagggggaggagacgcgcggggcgggccgccagcggggacaggcagcccggcgggccgagaagaagc

SEQ ID NO: 241508 - RNA, 68 nt, Homo sapiens
accagcggccagaggcaggagacggccccaaaaaaccggggggagcacggcccagcaacagcacagac

SEQ ID NO: 241509 - RNA, 78 nt, Homo sapiens
ggaggcgacccgcgccccgcccagccgcccagcggacgaaggaggcgaagaggcgcgcaggagcacccgccccacccc

SEQ ID NO: 241510 - RNA, 56 nt, Homo sapiens
gccagcagacccagcacgggacagaggaaacaccgaccaacgccaaagaaacggaa

SEQ ID NO: 241511 - RNA, 70 nt, Homo sapiens
gcaaagaaagaagcacaaaacagcaagagcaagcagagcacaaggaacaaaaagaaaacgaagaacggga

SEQ ID NO: 241512 - RNA, 91 nt, Homo sapiens
ccgagccccgcgggccgcgcgggacccgccaggcggccgccccggaacggccaacggagaagcacaggcagagacacaagcagccgaaaaa

SEQ ID NO: 241513 - RNA, 78 nt, Homo sapiens
cccaaaccaaaggagaagagaccacccacacaggagagaagacggggccccaggcccaggcggaacacaggaaccgag

SEQ ID NO: 241514 - RNA, 74 nt, Homo sapiens
ggagaaggccggggagccccgacagaccacagaccaagcggcggggaagaaggaagggcccagagaaccagccg

SEQ ID NO: 241515 - RNA, 75 nt, Homo sapiens
cccacgaacccgaagcccccaaagagagaaccggagagcacccaacagaagcagagaaaacccggacaacagcca

SEQ ID NO: 241516 - RNA, 75 nt, Homo sapiens
gagcagcaaaagagacagaaacaaagcacggagaacccaagaaaaagcaccaacaagaagaaaagaaaccagcaa

SEQ ID NO: 241517 - RNA, 76 nt, Homo sapiens
gggcaagaggacgccacaaacacccaccacagcagagaagcaagaagccaagggaaaagcagagggcacgcagcaa

SEQ ID NO: 241518 - RNA, 81 nt, Homo sapiens
aggaccaacaagcacaaagagccaaaggacgggaagaacccacgcgcgacgaaaaaaacgccgaagggaccaggcagacgg

SEQ ID NO: 241519 - RNA, 65 nt, Homo sapiens
aacccggggaggacaagagagcaaaggccgcggggcgaagccaaacccgaccacagccccacgca

SEQ ID NO: 241520 - RNA, 76 nt, Homo sapiens
aacagggcaaccagcggaaccaagcagggagcagcaacagaaccaacgaacccacgaccccaggcaggagcacaca

SEQ ID NO: 241521 - RNA, 82 nt, Homo sapiens
cccgcccgccgcccagagagggccagagcgcggggaggcaagagaccaccagcggccaccacacgggccacagacaagagag

SEQ ID NO: 241522 - RNA, 58 nt, Homo sapiens
acacggcacagaccagggacggaaaaggagcccaccaacgcccccagcaacagccggc

SEQ ID NO: 241523 - RNA, 62 nt, Homo sapiens
cggagaacccgcccagaagccagaccccaggcccaaaaacaagacgggagagggagcccaca

SEQ ID NO: 241524 - RNA, 60 nt, Homo sapiens
agcagaggcaacacagcgagcgaagccccacccaggggggacagaacgccgcgcccaggc

SEQ ID NO: 241525 - RNA, 67 nt, Homo sapiens
cacagagcaggcgcgccaacacaagagaaacaccaaacaaggcacggggccaaaaaggcacgaggga

SEQ ID NO: 241526 - RNA, 64 nt, Homo sapiens
agggggaggagccgaacgagccccagccagggagcggcggcagcaggaacaagacagacagaaa

SEQ ID NO: 241527 - RNA, 83 nt, Homo sapiens
caagcaggacggcgcggacggccccccaggggccccagagcccgcgcggcggcacccaccccccgagcccgcccgccggcccc

SEQ ID NO: 241528 - RNA, 69 nt, Homo sapiens
cgcccaagccccaccgcgagggaagaaggagaaagggccaaccccgaagaagcaaacagaaacgaagga

SEQ ID NO: 241529 - RNA, 70 nt, Homo sapiens
agggcaacaccaaaaacaaaacgaaccaggacggcaaggaacaaagagcagaggccagcagccaccgaca

SEQ ID NO: 241530 - RNA, 79 nt, Homo sapiens
cccccaggcagggaacccgggcccgcaccaaccagcggacacacggaaaagggacgggaaaagccgagaaagagaagaa

SEQ ID NO: 241531 - RNA, 75 nt, Homo sapiens
acaccccggaagcgggaaaggagaagacagaggagccagaccaagagacagcacaggcgagcgagcagagacacc

SEQ ID NO: 241532 - RNA, 77 nt, Homo sapiens
caagacaccggcacgcaacagccccacacagggagagaggaggggaccaagccggaggaggacacggcccgggggac

SEQ ID NO: 241533 - RNA, 73 nt, Homo sapiens
aagggaaagcgacaacaaaaaccccgaacagcgaaacgcagcagagcgaagcgaggggggaggcgcaaaaaag

SEQ ID NO: 241534 - RNA, 77 nt, Homo sapiens
caggggaacagacagaaggagcaggaaccaaagggaagaaggagaaagacaaagccccgagaaagaccagcaccgcc

SEQ ID NO: 241535 - RNA, 74 nt, Homo sapiens
gcaacaacacaaccggacacagaagacaaaggaccagggaagaaccggggagaaacgaagaaggcccagaagag

SEQ ID NO: 241536 - RNA, 80 nt, Homo sapiens
caggagacgagccccgggcagcccgaggagaagaccagcgaccgcgagggagacagaacaagggccgcgggaacgaggcg

SEQ ID NO: 241537 - RNA, 63 nt, Homo sapiens
gacagcagccaggagcagagcgacagcggcgagcagaacacggcgagcgggaagaagcggcag

SEQ ID NO: 241538 - RNA, 73 nt, Homo sapiens
caggaccacccaccagccaccagccgagcaccaagagccacaccaaaaaggaagaagaaaggaccagcagcgc

SEQ ID NO: 241539 - RNA, 55 nt, Homo sapiens
ccacaccccgaaacggcggaacaccaggaccgggaaccccggacaaaacgcgcaa

SEQ ID NO: 241540 - RNA, 71 nt, Homo sapiens
aagaaggagcggaacacacagcaagccgccgggacagccacgacggccgccacccacaagaaaaaaaagaa

SEQ ID NO: 241541 - RNA, 62 nt, Homo sapiens
caggcagagacgccgggacggcagagaacccacaaagaggcggggcaaagagaaccaggaga

SEQ ID NO: 241542 - RNA, 88 nt, Homo sapiens
gagcaccacggaccccaaggaagccacggcagacacacaacccgacccgacgacccaggcagaaggggagaggaggaagaaggggagg

SEQ ID NO: 241543 - RNA, 87 nt, Homo sapiens
ggcgacccggggggcgcgcccagagccccgcgcagcccagggaaggacagcccagagcaagcacacggaggcccgggagccagaccg

SEQ ID NO: 241544 - RNA, 79 nt, Homo sapiens
gccaccagcgacgcgggaccccgcacggcacccgccacgggccaagcgcgccgggcgaggcgccacccaccccggagcg

SEQ ID NO: 241545 - RNA, 75 nt, Homo sapiens
gcccccaagagcggaacacaggcgcccacaccacgcccagggaaagaccaggagcaggccaagggcgcagaaaac

SEQ ID NO: 241546 - RNA, 83 nt, Homo sapiens
acccagagacacccccgaaaccacccccaggggagaggaagaggaggggacacaaaggaagaggcagccagacagcaccagcg

SEQ ID NO: 241547 - RNA, 54 nt, Homo sapiens
caccccaacggcccacggacaggacccacaaagggcagcaacaacaacagcggc

SEQ ID NO: 241548 - RNA, 74 nt, Homo sapiens
gggcgacgagcgacccgggagacacgacggccaagaaaccagcaccagaaagccccgggaagaagcccagcaag

SEQ ID NO: 241549 - RNA, 38 nt, Homo sapiens
ccggggagaaaagcccaccgacagaagggcaccaggga

SEQ ID NO: 241550 - RNA, 73 nt, Homo sapiens
acccacccccggacgccgcacaaaagcaacaaggaaagaaccaacggacaaggccagagaagcaaaaagaacg

SEQ ID NO: 241551 - RNA, 81 nt, Homo sapiens
agggcgaagcacgacacagaaggggaggggagggaaaggcccaggaaaaagcaaggcgccaccggaagaaacgggagggga

SEQ ID NO: 241552 - RNA, 78 nt, Homo sapiens
ggccacacggcgcgccagcggcagaccagggcccacgaagacgaaaccacgggccgcccaacaacaacggagcgggcc

SEQ ID NO: 241553 - RNA, 51 nt, Homo sapiens
cgcagggcgcccccggggagggagagagaggaaaagaaagaggagcagggg

SEQ ID NO: 241554 - RNA, 79 nt, Homo sapiens
gaggcgccccagagcccagggcaggacaccgacaggaacagggaccacggggacagaagacgaaggcgggcgggcggag

SEQ ID NO: 241555 - RNA, 77 nt, Homo sapiens
ggacggaccgagaccggaccgagagcggaccgagagcgcgaaacgcacgagaagggggcccagagagggccgaaccg

SEQ ID NO: 241556 - RNA, 87 nt, Homo sapiens
gccgggcgggaccggcgcggcgccgggggcaccgcgccgccgaggcagccggcgaggggggagcccagcaggagcgggaaaaccgag

SEQ ID NO: 241557 - RNA, 75 nt, Homo sapiens
aaaggagagaaaagagcagaacgaagaaacccgcaggccacagagagcggcacaagcccagaacccagcagcgga

SEQ ID NO: 241558 - RNA, 76 nt, Homo sapiens
cgcacgcacccgcagcgcagcaccagggcggagggggagagccaacagacacgccacgcgaagcgcaggaggccgg

SEQ ID NO: 241559 - RNA, 41 nt, Homo sapiens
ccgagagaagcgacaggaggcaacacagcacccggcggcaa

SEQ ID NO: 241560 - RNA, 81 nt, Homo sapiens
accaacaaacaaacacaagcccccccagaccaggccgaagaacaggagaaggaagaacaaagaaagacagaggaaaggaga

SEQ ID NO: 241561 - RNA, 99 nt, Homo sapiens
cgggaagccacagcagccacgcaagagcaggccgagacgcgcgcaggacccaaggccagccagccccaggcaccagcggacaggacagggaggacgaag

SEQ ID NO: 241562 - RNA, 58 nt, Homo sapiens
cggccgcgcaggcgccgcccgcggggcccgcaggggccgcaaggccaggcgcgcagag

SEQ ID NO: 241563 - RNA, 72 nt, Homo sapiens
ggccgacgggcacaccaacccagaacacccagggagcggcggagaaaccaccacaaacacgaggccagcaac

SEQ ID NO: 241564 - RNA, 75 nt, Homo sapiens
gaaaagggccaacagccgaagagccagaaagagccaagaggacaccagaaaccagaagggacgaggcgaaaacaa

SEQ ID NO: 241565 - RNA, 75 nt, Homo sapiens
agcagaagaaacgaagccgcagaaacaaccggagaaaagagaggagaagaaacccgagaaaaagaccaagagaaa

SEQ ID NO: 241566 - RNA, 85 nt, Homo sapiens
aacgggccagcgcgcaagaggccacggcgggggcaccgagaagccccgaccgacggacagcccagagcaagcacacggaggcccg

SEQ ID NO: 241567 - RNA, 64 nt, Homo sapiens
aggaaccagaagggccaccccgaccccaagggcagccgagaaggacaagggcaggacacgaagg

SEQ ID NO: 241568 - RNA, 77 nt, Homo sapiens
gcggaccggcaccaacaaaacaccgaggaccagccacaagaagacagacacgaggaaggaaaagaccaccacaagcg

SEQ ID NO: 241569 - RNA, 91 nt, Homo sapiens
cggcccggagggaaggccagaccaaccccacacaacaagaagacagagagggagcgggcgcaccaggcccgaggcccaaaccggcaaccca

SEQ ID NO: 241570 - RNA, 51 nt, Homo sapiens
gcagcccggcggacgccggcacagaacgagcagaaggcaagaaagggagaa

SEQ ID NO: 241571 - RNA, 79 nt, Homo sapiens
cccggcccgagaagacacacagcccaaggagggaacagggcacaaccaaggagggccagccaccccacagaagacggag

SEQ ID NO: 241572 - RNA, 68 nt, Homo sapiens
cgcggaccgcagagcaccccaggaaccgaggcaggcccgagcagccccgcccaacaggacccagaccc

SEQ ID NO: 241573 - RNA, 80 nt, Homo sapiens
gggacaagcagcaaggcgcggggggccacgcgaggccgagcgacaggaagaggcacaacaaagaaaagaaccccgaaagg

SEQ ID NO: 241574 - RNA, 80 nt, Homo sapiens
gaaaaccaggacgccacaggcacaaaagcgaacaccagcagaaagaggcacagacgcaaagcggacagagcacgaagaag

SEQ ID NO: 241575 - RNA, 54 nt, Homo sapiens
caacacagaacgaagagaagaagcgaggggaggcaagcaggggggcaaaggaaa

SEQ ID NO: 241576 - RNA, 34 nt, Homo sapiens
cacgcggccggaagccggagagacggggcgccgg

SEQ ID NO: 241577 - RNA, 74 nt, Homo sapiens
ggacaagaaaagcgggcaaccgaaagagacccccagaccaggaaagacaggaaaacagcggggccaacaagccg

SEQ ID NO: 241578 - RNA, 72 nt, Homo sapiens
aggcaaggggccaccaggaggccagggggcgccaggggaaaaagaccacaagaggaaaacgcaagcccaggc

SEQ ID NO: 241579 - RNA, 70 nt, Homo sapiens
aggggagacgcgaccagccacagccgcagaaagcaacaaagcgagagcacaagaaaacagccccgagcac

SEQ ID NO: 241580 - RNA, 74 nt, Homo sapiens
cacacgaacacaccgaaagacaagaaagcacccgggggagccgccaccaaaagcagacggaaaacccacgggga

SEQ ID NO: 241581 - RNA, 77 nt, Homo sapiens
agcggacgcgggacggaagcacacgcggcgggcaaaaaacaggcagccagacgaaacacaggagacgagcgaacaag

SEQ ID NO: 241582 - RNA, 75 nt, Homo sapiens
acggccccgggcgccccgcggcgcccccaggaccccgcacgggagaaaacccggaaagcaaaacaaacggagaga

SEQ ID NO: 241583 - RNA, 64 nt, Homo sapiens
acgagaccacgccaagagacagcgacagggaccccaaggggaccacggaccaagaggaccagaa

SEQ ID NO: 241584 - RNA, 75 nt, Homo sapiens
ggcacacccaccaacccagagcagccaggccagagagccagaacggagaggaccgaccgagagcgacaaagacga

SEQ ID NO: 241585 - RNA, 73 nt, Homo sapiens
gagcgagccagaccgggaccagcacccgggggccacacagcgcccagacgggagcgaggggacaccgcagaga

SEQ ID NO: 241586 - RNA, 84 nt, Homo sapiens
gaggcggggggcccaagcaaggccggaagaagagcgcagagcgccacgcagagccccgccaggaagacacgccggggaacgaag

SEQ ID NO: 241587 - RNA, 54 nt, Homo sapiens
acgcagaggggaacaggggagcgaaggaggcccaggcgcggaggaggaaggacg

SEQ ID NO: 241588 - RNA, 73 nt, Homo sapiens
cagacagcagggccgaccaagcaccgcagacccaaccccagaggacacgagcccagccaggcgagccagcgcc

SEQ ID NO: 241589 - RNA, 84 nt, Homo sapiens
gggacccggccaccagcaagccgggacaggggccacggagagacgcggagccagcagcaggacccaccaccacaggggagacgg

SEQ ID NO: 241590 - RNA, 69 nt, Homo sapiens
agccggcgcaggccagagagggcccgggaagagagcgaggagacaagagaccagcccagagaaggcgaa

SEQ ID NO: 241591 - RNA, 74 nt, Homo sapiens
cccgcggacaaaagcaacagaaacgccgcacaccaggaggcaaagaaacggagagacgaaacacacacggcgag

SEQ ID NO: 241592 - RNA, 79 nt, Homo sapiens
ccagaagcacagagcaagaggagccaagcagcagaagagcaaggagaaccccacgaaacaggcgccaagggacaaacaa

SEQ ID NO: 241593 - RNA, 82 nt, Homo sapiens
aaaaaggacacacggaacacggcaaacgaagcacggcaggccaccagccggcaggacgcgcccgggagggagaccagagcgg

SEQ ID NO: 241594 - RNA, 73 nt, Homo sapiens
cgacccgcggcccccgaccgcccagcggaagccgaagcggcgggccagggagaacagagggagccgcccccga

SEQ ID NO: 241595 - RNA, 75 nt, Homo sapiens
gaacaacagcggaggacacaggcaccagacgggacagaaaaccagagggccaacagagcacaggcaaggcaccga

SEQ ID NO: 241596 - RNA, 36 nt, Homo sapiens
cgacgaaaaaagaccaagaccccacggaagaaccaa

SEQ ID NO: 241597 - RNA, 65 nt, Homo sapiens
cgcccacgaccccagcaggggaaggcacaagaagaggcaagcagggagcaaaagagacaggacac

SEQ ID NO: 241598 - RNA, 74 nt, Homo sapiens
accgcagaaggccggagacaccagcagaggagcaccggcccaggcggaggcaaggcggacccggcggcgcaacc

SEQ ID NO: 241599 - RNA, 67 nt, Homo sapiens
aagaggagagaacccccgacagccaggaagccacacgggcaagcaaaacggagaccgagaagcgagc

SEQ ID NO: 241600 - RNA, 84 nt, Homo sapiens
ccgcccagccccgagagcgggacacagaaccgaaagggaaccgagaggagacgaggaaacccagcagcagagaaagacccaacg

SEQ ID NO: 241601 - RNA, 59 nt, Homo sapiens
cgcccaccgcggagagcagcacgaccccagcacaggaagagagacccagaaacagccgg

SEQ ID NO: 241602 - RNA, 79 nt, Homo sapiens
gagaccagaccccagagaggaggcacagaagggccacgaaagaacgaacagcaaacacagcgacaaacagcgagccccg

SEQ ID NO: 241603 - RNA, 75 nt, Homo sapiens
gcaacgggccacaacccacgaggacaaaagcaacgaccgagaaaaagggagcggcaaagaggcagacccagagcc

SEQ ID NO: 241604 - RNA, 42 nt, Homo sapiens
gcccggccgagaccccgcgggagaaacagaccacccccaaac

SEQ ID NO: 241605 - RNA, 76 nt, Homo sapiens
gcaagcaccccagaaaaagcagggcagcagcccagaagaaagaccggaaggaaacaagaggagcggcaccgaggac

SEQ ID NO: 241606 - RNA, 77 nt, Homo sapiens
agggggcggacagaacacgaagccagaaagcaagccagggcgagcaggaagaagaacaagaacacacaagaaaacag

SEQ ID NO: 241607 - RNA, 80 nt, Homo sapiens
cgcagcggagggacacggaccgaaggagcacagaccagcgcgcgaccggagccccacagcggcacaggccccagccaagc

SEQ ID NO: 241608 - RNA, 75 nt, Homo sapiens
gcaccgcggacggggccgcccaggagagagacgaggaaagaaggaagcagcgaagcagggaggaagaggcaacca

SEQ ID NO: 241609 - RNA, 68 nt, Homo sapiens
ccgaggaaacccgccgcgcaccagcaggcacagaaagaaaaaccggaagggaaacccgcgacaccgcg

SEQ ID NO: 241610 - RNA, 72 nt, Homo sapiens
gcaagccggaggagaagcaagaaggcccggacacagcaaaccgggccacagagcgccgcacccacaccaaag

SEQ ID NO: 241611 - RNA, 59 nt, Homo sapiens
accagcacagccggaacaagcaccgcaggggaaaaacggagacgggagcaggaaagaaa

SEQ ID NO: 241612 - RNA, 61 nt, Homo sapiens
acccaagaaaaggcaacggacgacacaacaaaagcgccgaacacaaggagacgacaaggcc

SEQ ID NO: 241613 - RNA, 74 nt, Homo sapiens
gagaagcaaacggcacaacaagccaggaccagaaagggcgggaaccagcgagcaggacccacacccgcgcacca

SEQ ID NO: 241614 - RNA, 67 nt, Homo sapiens
acaaaaacgggaaagaacagagaacgaggaagaaaaggaaacccaaaaagacaaggccaagcagcaa

SEQ ID NO: 241615 - RNA, 80 nt, Homo sapiens
cagggcaagggagaagcagcccacccaccgcaaaccacaccaacaccgggaggcgcaccaggcccaggggaaggaaggag

SEQ ID NO: 241616 - RNA, 70 nt, Homo sapiens
gaaggcaccaaaagcaagaaacacaacgaaaggaaaaggaccgaggcgaaaggcgccaaccccagaacaa

SEQ ID NO: 241617 - RNA, 63 nt, Homo sapiens
agaaggagcggagcggcagcagaaggaggacacccaggggcccccaccagccccagcacacga

SEQ ID NO: 241618 - RNA, 77 nt, Homo sapiens
cagccgcgccagccaaacccaggagaacacaggagacaaaggacaggcagaaaccagaacaggcaaagggcccccag

SEQ ID NO: 241619 - RNA, 47 nt, Homo sapiens
cgaaaacacccgcaaccagacaggaggcagcaggaagaaccgaaaac

SEQ ID NO: 241620 - RNA, 75 nt, Homo sapiens
caacaacggagaaaagaagacgacacaggcaggcacggcagacacaccgaccagaggaaggcgaacccgccacgc

SEQ ID NO: 241621 - RNA, 79 nt, Homo sapiens
cgccggccgcagagcacgcggagcgacccgccacgcggggcccagggcgcggcccccaggccccagggccccggcccca

SEQ ID NO: 241622 - RNA, 80 nt, Homo sapiens
ccgccaaagagagcgcaccaccacccagggagacagggacagcgacccgcagccccccgggcaaaagcagaccggaaaac

SEQ ID NO: 241623 - RNA, 70 nt, Homo sapiens
caggaccgaagggccggaaagaaagcacaccaaaagaaacaacccaagaggaaggcagcgacccgagacc

SEQ ID NO: 241624 - RNA, 98 nt, Homo sapiens
aacaggcaggaaaaacaggggagacagcggcgaaaggaagcaagcagaagacacgaggcagagggcagaccggaagagaagaaggagcagaaggaaaa

SEQ ID NO: 241625 - RNA, 79 nt, Homo sapiens
gacacagcagggggccgcacgagaaggagagccagccccgaggaacccagccacagcgcaagccagcccgcaggccccc

SEQ ID NO: 241626 - RNA, 88 nt, Homo sapiens
cgggacagcggccgggacagcggcgagacgcgcggggagcgcgccggaccaagcgggcccagaagcggcaagaggagccaggagcacg

SEQ ID NO: 241627 - RNA, 83 nt, Homo sapiens
gcaccaccaaagcgagccagggaaggcgaggggcgagaacgaccggaccggagaagaagagaagcgaggacgggaagaccacg

SEQ ID NO: 241628 - RNA, 82 nt, Homo sapiens
gaccagacgcggagccaggccgaggggcggacgcggccggagccggcccaggagcagcagggaggcgggaacgcccagggag

SEQ ID NO: 241629 - RNA, 78 nt, Homo sapiens
aaagacgagcagacacgcaaagaagcccgaggcgcaagagacaacaaagaagccggaccgagaaccgaaggaggaacc

SEQ ID NO: 241630 - RNA, 85 nt, Homo sapiens
gcccaccgggaagccggggggcccggaaagagagagcaggcgaagaggaacgaaccgggcccaggacaacaacgggacacaccag

SEQ ID NO: 241631 - RNA, 74 nt, Homo sapiens
aagggcggggggcgggccggaggggagacgggaggcagaaccccacaaggacaacgaggcaacgcagacccagc

SEQ ID NO: 241632 - RNA, 64 nt, Homo sapiens
cacgcccacaaagcccagaagaagggcaccagcgaaggacggaagcacgggaaaccagcaaccc

SEQ ID NO: 241633 - RNA, 70 nt, Homo sapiens
acccaaggcaagagaaagacagagaccgcagcgcccaagcccgcaggagagccgcccgacacccgccccc

SEQ ID NO: 241634 - RNA, 79 nt, Homo sapiens
agccagcacagcaccagcagccacgccgagcggcacccaggggcgccacagccccaccagcagccgcaccggagccccg

SEQ ID NO: 241635 - RNA, 96 nt, Homo sapiens
aaaaacggagggaagagaagggcacaaaaaaggaagcccacagaaaggcccagacacccagcagaaacaagaaaaacaaccaaagaaagccgagca

SEQ ID NO: 241636 - RNA, 69 nt, Homo sapiens
ccccaccagcagggacgagggcggggaggggcccccgcacccccgcaccagcaccaggacaaaagaagg

SEQ ID NO: 241637 - RNA, 76 nt, Homo sapiens
gggccgggagaaaaagggaagaaaacaaagagagaaagcagcagcaagccccagaggggaagggggcacaggaacg

SEQ ID NO: 241638 - RNA, 56 nt, Homo sapiens
aggagaaggaaggcaggaaagccagccggcgagagcaggaggcagcacggcaggag

SEQ ID NO: 241639 - RNA, 61 nt, Homo sapiens
aaggaccgagcagccccgccacccgggcagagagacgaagagagaagcagggcagaaagag

SEQ ID NO: 241640 - RNA, 34 nt, Homo sapiens
ccggagacccagagccgggggaagcagacacccc

SEQ ID NO: 241641 - RNA, 86 nt, Homo sapiens
gagcacagaggagaccaaccgcacccccgagaccccgagggaacagcacgcaaagaggacaaacagagcaacgaacagcaggacgg

SEQ ID NO: 241642 - RNA, 86 nt, Homo sapiens
agcggaaccgcggggcagaggcggcggccgcagcggcgcagcgaagcaggaacagccacaccagcggacagccaccaagaggccag

SEQ ID NO: 241643 - RNA, 81 nt, Homo sapiens
gcggacgccgaggcaccgaggcaccagaggagcggacaaggccaacaaacaccaccacacagccggcccgagggggcccca

SEQ ID NO: 241644 - RNA, 72 nt, Homo sapiens
gaaaaagcacaaagaggcggcccacgcagcagaaacgcggaggcgcaacagaccacgggagaaaaacaagaa

SEQ ID NO: 241645 - RNA, 74 nt, Homo sapiens
cagccccgagagcgggaacaggagacgcggcccccggggaaaagcccccgggaagcaggggagccagccccccg

SEQ ID NO: 241646 - RNA, 63 nt, Homo sapiens
cggaggcgccccaaaaggccccccgcgcaggcacacagcaaaggggagggagcagagaagaga

SEQ ID NO: 241647 - RNA, 75 nt, Homo sapiens
gcccagccccgaggagcgggaacagagggccacccgcaagggcaggagaaagcaacacaccgcaacgaaggccca

SEQ ID NO: 241648 - RNA, 75 nt, Homo sapiens
ccaaccacgcggaaccccaaacccccagacaagaacacaacccaaacccgcccggcacacagagaaaaaaaggga

SEQ ID NO: 241649 - RNA, 77 nt, Homo sapiens
ccgcggaaagaaagccggaaaggaacagaagacaggcagaaaagcccggccggagggacggcgcagacaccacccga

SEQ ID NO: 241650 - RNA, 72 nt, Homo sapiens
gcccacaaccagcccagcagcagcaagcagagccaaagaggcgccagacaaggccaggccagggacaacccc

SEQ ID NO: 241651 - RNA, 81 nt, Homo sapiens
agcagggggagcagggagcaaggcaggcaccacccagggaagaaggagaaagggccaaccccgaagaagcaaacagaaacg

SEQ ID NO: 241652 - RNA, 72 nt, Homo sapiens
acgccaagcaccgacacccccaaccccaagcgcccgggaaaagaagacacacaacaacaggaggcaaaccca

SEQ ID NO: 241653 - RNA, 50 nt, Homo sapiens
caccaggcacccggggaggaggcccagcccagacaggagcgcgaaagggg

SEQ ID NO: 241654 - RNA, 82 nt, Homo sapiens
agcggcaggacgcgaggagcgggcaaggccaggcgcgggccaccccacggggcaacaagggccaccagcagggacggcgcag

SEQ ID NO: 241655 - RNA, 72 nt, Homo sapiens
gggcaggacccggacccggaagagaagagggggcaagaaagcaagccccagccaagacccaccaggcagggg

SEQ ID NO: 241656 - RNA, 51 nt, Homo sapiens
acgcgcggaaggcagcgcccagcagcgcaggccagaacacagcagaaaggg

SEQ ID NO: 241657 - RNA, 75 nt, Homo sapiens
aaaaaccggacagccaagcaacagcccagcaagggcgggacaagggcgcaccggggcgcagcgagggaggacaac

SEQ ID NO: 241658 - RNA, 79 nt, Homo sapiens
ggggcagcaaaggaaacaccgaagcaaaaagaagcccggcagaagacagcaaagaaaccccaaagccagcaagaccaca

SEQ ID NO: 241659 - RNA, 78 nt, Homo sapiens
gagaggcaagacgggacggaccagcccccccacccggcaagccgaaaacggcgagaaggggccaaggagaccgcacgc

SEQ ID NO: 241660 - RNA, 55 nt, Homo sapiens
cacaacccaggcaaccaacagccccggcgcaggaacacaggacggccgaacacga

SEQ ID NO: 241661 - RNA, 84 nt, Homo sapiens
cggagcggccggagggcgcgggaaggagccggaggcggcgaggagcgccgccgaggagagcaggaagcccaaaagggaagaagg

SEQ ID NO: 241662 - RNA, 72 nt, Homo sapiens
agaggccgcccagccgaaccggcaggcgaagcccgcgaaaggacagcggaagcggacagaacaccgggaaaa

SEQ ID NO: 241663 - RNA, 83 nt, Homo sapiens
agcggcagaggagaagcggaagcccggagcagcgcagcccacacgaaggcgggaggaggagagaccagcagcaaacccacgcg

SEQ ID NO: 241664 - RNA, 73 nt, Homo sapiens
agaggagcgaaaagcagcaggcagacccagagaagcagccgaccagccgagggcgaggggagcacccaccggg

SEQ ID NO: 241665 - RNA, 78 nt, Homo sapiens
ccaaacggaaccacgcgcaaaagaggaaacccccaaagagaaagaagaagaaaacgagacccaaaagggagaaagaag

SEQ ID NO: 241666 - RNA, 76 nt, Homo sapiens
gccgggagggcagacgcggccgcggcaccccgaacggggccccccgcgcgagggcggagaacggaaaagcaccagg

SEQ ID NO: 241667 - RNA, 77 nt, Homo sapiens
cacgaaacgagccaaaggggagcacgaggggaacgcaacccaagcaacgaacaggagcgaagaaagcaggggaggaa

SEQ ID NO: 241668 - RNA, 76 nt, Homo sapiens
cgaggaagcaaggccgcggggggagaccccaccaccggcacggcccacggcaggcggacggaggaccggacccaag

SEQ ID NO: 241669 - RNA, 77 nt, Homo sapiens
gaggacggggaacgacgcgcgccagccccgcacccacggccgagagaagcaccaaggcacaggggcggcacagcaga

SEQ ID NO: 241670 - RNA, 72 nt, Homo sapiens
gaccgaaccgaaaaacagagggaggagcaagacagcgagcagggcagaacggggagccaaccagggccagac

SEQ ID NO: 241671 - RNA, 113 nt, Homo sapiens
agagggggcaaagaccacccagaacgacccaacacgagcagagacacgggagcaaaaccagaacagagagcagagcgacacgaaaagacagaccgacaacagcccagaagaag

SEQ ID NO: 241672 - RNA, 61 nt, Homo sapiens
ccaggaagaagacaacagggcaagaggagcagcagcggcggggccaagcgggagagcgaga

SEQ ID NO: 241673 - RNA, 74 nt, Homo sapiens
aaaagcgggaggggagccggcagacccgaccacaggggaaccaacaagccccaagcaagccgagaaaccaccag

SEQ ID NO: 241674 - RNA, 50 nt, Homo sapiens
cagcgccacagacagaaaaggggaaagccggggccccggggacccgcggc

SEQ ID NO: 241675 - RNA, 80 nt, Homo sapiens
cagagccaggccagccggagcgccgaggacgacgacagaacggagccggaccagggagaagaaaggggaccggggacaca

SEQ ID NO: 241676 - RNA, 66 nt, Homo sapiens
ccagaagccgcacgcacgcaacccccagaccgccaggaaggagggaccaggcaaagacaccaccaa

SEQ ID NO: 241677 - RNA, 85 nt, Homo sapiens
aaaggcccgccgagaaaaacagaaaaggagagaaaaagaggagccgaaacgccggacacagaagcagaaaaaccggagggagaag

SEQ ID NO: 241678 - RNA, 58 nt, Homo sapiens
accaagaacccaccacccagcagcagggcacaaggagggagcaacaacaaggagcaag

SEQ ID NO: 241679 - RNA, 72 nt, Homo sapiens
agaaaagggagcaggacaaggaagaaaagaccagagagaagcaagagccagaagacgagacgggagaccaga

SEQ ID NO: 241680 - RNA, 53 nt, Homo sapiens
acccgcccccaacagcaaggaaccggagcaaacgacccgaccagcgcgcggcg

SEQ ID NO: 241681 - RNA, 58 nt, Homo sapiens
gcgcggaaggcagcgcccagcagcgcaggggaaaaggaacagccgagcaagaccggcc

SEQ ID NO: 241682 - RNA, 35 nt, Homo sapiens
gcccgcgaacaagacaagaaaaaagaggagggaac

SEQ ID NO: 241683 - RNA, 68 nt, Homo sapiens
ggcagcacagcaacgggcgccgccgggagcaggccggggccacaagacagaaggcgcgggagaaaagc

SEQ ID NO: 241684 - RNA, 75 nt, Homo sapiens
ggacgcgcgggagaaaacggcgcaccggagagacgcagaggggcggcggggggaaagagcagagggagcagccgg

SEQ ID NO: 241685 - RNA, 63 nt, Homo sapiens
accccccaagcggcacgaaaaccccacgcgccaggaagaaaggccgccacacacaagcaggca

SEQ ID NO: 241686 - RNA, 52 nt, Homo sapiens
gagcagcccccagccagccgcgaggaagaagagagggcgaaggaggccacac

SEQ ID NO: 241687 - RNA, 74 nt, Homo sapiens
gaccccccggcgccgcgccggcggcgggaagccacagccgcgcggaagcggccgggcgaagggagcccaagaag

SEQ ID NO: 241688 - RNA, 82 nt, Homo sapiens
agaggcaccggaggaggaacagaccagggcggcgaggaggaggaggacagaaaggaggagcaggcagcaccgcaccgacggc

SEQ ID NO: 241689 - RNA, 72 nt, Homo sapiens
agcgggcaccagggccgaccgccgcaggaagagagaaggccacgcccgaccccaagcaacaacggggcaggg

SEQ ID NO: 241690 - RNA, 85 nt, Homo sapiens
ccgcgcgcccggccaagaggcaaaggggaggacgcagcaaaccaccagaaggcagacaagagggcccaaggacggaagcgcggga

SEQ ID NO: 241691 - RNA, 87 nt, Homo sapiens
gaacccacagacggcggcagggggacccaggagccccaaaaccacagcggcccccaggcacgaagcgaagaagaggagagaagcagc

SEQ ID NO: 241692 - RNA, 71 nt, Homo sapiens
aaccaggaacaagaccaaaggaaaccccgcacacgaaggcccccacaagaagacaccgcggccggcgaccc

SEQ ID NO: 241693 - RNA, 85 nt, Homo sapiens
ccggggagcggcgcccccgccgcgccgccgcgacccggcgccgccccgcaacgggaggcgacagggggaccgcggcgcgagggac

SEQ ID NO: 241694 - RNA, 83 nt, Homo sapiens
ggggcaggccagcgaccggccggagcccagagcccgaaggaagcacaaacaggaaaggaacaaccggaccagccacgcaaaaa

SEQ ID NO: 241695 - RNA, 79 nt, Homo sapiens
caggaccgccccggacaggaggagaaggccgccaagagcgaccggaagggagaggcacacgccgcaaagcggaagaggc

SEQ ID NO: 241696 - RNA, 71 nt, Homo sapiens
cagcaagaggccagagcagacgaagaccaacgaaagaaaacacacacacacaagccagaagcacaagaagg

SEQ ID NO: 241697 - RNA, 78 nt, Homo sapiens
gaacagagaacagcgccggaaaaccaccaccccaggccgacgcccccaacccaccccacccagagacgagccgggggg

SEQ ID NO: 241698 - RNA, 67 nt, Homo sapiens
cagaacgccaggaccaaaacagggagaaacacagccagaaggggacagagacgcgaagaggagacag

SEQ ID NO: 241699 - RNA, 73 nt, Homo sapiens
accaaggcccccggacacacagaggaggcaaaaacaagcacacacaaacagcagggacaaagaaacaagcgac

SEQ ID NO: 241700 - RNA, 68 nt, Homo sapiens
gccggaaacaacaaaagaccggaggaacgcccaaaacgacaggacacccaggcggcccggcaggagga

SEQ ID NO: 241701 - RNA, 83 nt, Homo sapiens
gggggcaaacccgagagaacgggagccgggggggcgagcccgccgagagcgccaaggaggagacaacgggggaagaagaaggc

SEQ ID NO: 241702 - RNA, 76 nt, Homo sapiens
ggagggaacccgaagcgggcgcgcgcacggcaggacggaggaagccggaagcacgcaaccagaaggccaagcacag

SEQ ID NO: 241703 - RNA, 61 nt, Homo sapiens
ggcgagaaggaggggcgagaagcgcgacccccgcgaagacccccacgcacggacccggggc

SEQ ID NO: 241704 - RNA, 78 nt, Homo sapiens
ggaagagacaggaggcagagccaaacacccagcgagcaacagcagaaaagagaagagacccacgcaacgaagcagccc

SEQ ID NO: 241705 - RNA, 82 nt, Homo sapiens
ggaggagcagacggccagagacacaaggccccggcagcagcagcgcgccgggggcccggaaagggacgcgcgcccagggagc

SEQ ID NO: 241706 - RNA, 71 nt, Homo sapiens
aagaagacagccacaggccagcgagagagacaagcagggcaaacgcaaaacgacaagacgaacgggcaaag

SEQ ID NO: 241707 - RNA, 111 nt, Homo sapiens
aaacagcagccaacccgccaaaaaagacaagaaaccgcacaagaccgggagggagcaaacgagacggaagaaaaaaccgacggcccgaaccacagccaacaagcagccagc

SEQ ID NO: 241708 - RNA, 110 nt, Homo sapiens
agcagggcgagacagcgaaagcacgaacaggaaacaggaagccgggagagaaacacagagccaccagacggacggaggcaggaaccggagaagaggagaggaagcaacaa

SEQ ID NO: 241709 - RNA, 52 nt, Homo sapiens
acaagaccccacccaaaagaccaagagaccggaaaccgagagaaacgaagac

SEQ ID NO: 241710 - RNA, 80 nt, Homo sapiens
gaggccccccagccagggaacgaggaggggcagaggagagggcacggcccacggaggggcagccaggacgcacggcggcg

SEQ ID NO: 241711 - RNA, 59 nt, Homo sapiens
gagcgcgccgcgagaccccgccccccagagagacggggcgccagggccaggaggcccac

SEQ ID NO: 241712 - RNA, 35 nt, Homo sapiens
gcggccagcgccacgcccccgcggcccagccaacc

SEQ ID NO: 241713 - RNA, 74 nt, Homo sapiens
aggaggcacagcgcgccaagcgaacggagagccagccgggaggccggggagagcaaaaccagcaccacgcggca

SEQ ID NO: 241714 - RNA, 76 nt, Homo sapiens
gcccccagcaccccggacagcacgagacacagcaggcgggcacccagaccaagggggaaagagaaaggaccagaac

SEQ ID NO: 241715 - RNA, 73 nt, Homo sapiens
cccacggagcaggagaagcccaaggcccagggcccccaagccggcaggggaacgaggagggagcgcggagcgg

SEQ ID NO: 241716 - RNA, 76 nt, Homo sapiens
ggaggcgacccaccccccagccccgccggccgagcgaagagcggcagaagggcggaagagaacccagcgcggcaag

SEQ ID NO: 241717 - RNA, 83 nt, Homo sapiens
cggggagcggaccggggagacggccggccgacgcccacgacgcaggcgagcgacggaggcgccgggccaggggcacagcaccg

SEQ ID NO: 241718 - RNA, 95 nt, Homo sapiens
gcggccgggggcagaccccagcccacaacccacgcgcaccggcggagcaagggaagccaggcaggacgacgggaaccacagacaaacggaaggac

SEQ ID NO: 241719 - RNA, 58 nt, Homo sapiens
gggggccacaaagccccccggagacgcaaccaagggagcaagccacaggagaggagaa

SEQ ID NO: 241720 - RNA, 87 nt, Homo sapiens
gcagaagccgagcaacaccccggccaccgacccacaaggcagggaagcccacgaggagaaaacacacccacccgccacagcgggagc

SEQ ID NO: 241721 - RNA, 69 nt, Homo sapiens
ccaggcacaggcagaaaagccaggcacgaacaggggaaaaagaaaagggcgaagacccgaagcagcgca

SEQ ID NO: 241722 - RNA, 71 nt, Homo sapiens
aggcacgagaaccggcccggcacagcaacccccagccacaacgcgaaccgggcggacgaaggaggcggcaa

SEQ ID NO: 241723 - RNA, 62 nt, Homo sapiens
cagccagcacaccccgcgagcaaggcagaggggcaggacaagacccgaagggcagaacccac

SEQ ID NO: 241724 - RNA, 85 nt, Homo sapiens
accggaagaccccgaaggaaaaggaggaacgccggcccgagaaagcccgccagcaggcgaagccgacgagcccgaacagacgcac

SEQ ID NO: 241725 - RNA, 85 nt, Homo sapiens
caagaacagaagaagaaagcagggggacgcaaaggccaaggggcggcaaaaagagggacaaacggagaagccaacggggagcaag

SEQ ID NO: 241726 - RNA, 77 nt, Homo sapiens
ccggcagcggagagccgagcccaaggcaagacccaaggcgacgaccgacaggggggaaaggaggcacaaagagagac

SEQ ID NO: 241727 - RNA, 67 nt, Homo sapiens
caccaaggggcaacaagcacaagaagaaaaaagacccacaggcgaagaacaaaagcgaagcccagga

SEQ ID NO: 241728 - RNA, 56 nt, Homo sapiens
cggacagagagacacaggcccaggggacacccagcaggccagggaagaggcagccc

SEQ ID NO: 241729 - RNA, 75 nt, Homo sapiens
ccacacaaggcaaacacacaaaagagaaaaacaaccagcaagggacgcgaaaaagacaagggcgcgaccagccac

SEQ ID NO: 241730 - RNA, 71 nt, Homo sapiens
ggacaccgcacccagaaacgacaggaaggaaaacacccggcagggaaggaaggaacgcaaccgaagacgca

SEQ ID NO: 241731 - RNA, 77 nt, Homo sapiens
ccgggcccgggccccggccccgggcccgcggcaagaggggacggggagacggcccaaggcccacggggacaaaggga

SEQ ID NO: 241732 - RNA, 69 nt, Homo sapiens
cggacgcagcggagcggacagcgcacacaacgaggcccacaccacaccgagcagagagcagaaggaaac

SEQ ID NO: 241733 - RNA, 75 nt, Homo sapiens
ggaccaagaaccagaccaggagagaagacgaaaaagaagaagcagcgaacagcgaaaagcccaaacgggcacaaa

SEQ ID NO: 241734 - RNA, 81 nt, Homo sapiens
gacggaccgagaccggaccgagagcggaccgagagcgcgaaacgcacgagaaggccagcacccagaaaaagcaccccgagg

SEQ ID NO: 241735 - RNA, 68 nt, Homo sapiens
agaccagaaaaaacagcacaccaggaagcaaggggacccaggggaacaaacaagagggcacgccggag

SEQ ID NO: 241736 - RNA, 83 nt, Homo sapiens
ggcgcacaagcagagggccagaaccaccgccagagccggccccgagccccggccccaaagacccaaaacagagacacccccca

SEQ ID NO: 241737 - RNA, 34 nt, Homo sapiens
gccagaccagaccaccaggagcgcgaaccaccgc

SEQ ID NO: 241738 - RNA, 74 nt, Homo sapiens
ggaaccgacaaggaagcccgaaagacgagcagaggccagaagaggaaagagagaagcgcgagggggacggagac

SEQ ID NO: 241739 - RNA, 77 nt, Homo sapiens
aagcagggggaaccaggggccccacggggaaaaagaaacacaggcgggaaaggaaccggaacccaaaggggaaacgc

SEQ ID NO: 241740 - RNA, 70 nt, Homo sapiens
aaccggggaagagagaggaccgcgccgagcgggaaaaacagcaagagggagagaggccccacaacacccc

SEQ ID NO: 241741 - RNA, 39 nt, Homo sapiens
gcacaaagcccgaagcaggaagaaggagaaagacaaagc

SEQ ID NO: 241742 - RNA, 74 nt, Homo sapiens
aggaccaggagcgggagagggccagagagcaggcggcagagcaaagcgagcaaggggaaaaacgaacccgccac

SEQ ID NO: 241743 - RNA, 69 nt, Homo sapiens
agccagccccccaggaccacagccccgaccgagagaaccagcgccaggggcaggcccggacccaggggc

SEQ ID NO: 241744 - RNA, 54 nt, Homo sapiens
aagggccacagccagaaggagggccccggagcagccacaccaccgaggccccac

SEQ ID NO: 241745 - RNA, 77 nt, Homo sapiens
cggaaaccgaaacggggaaaaaaaccgcagggcggagagaccagccgggccgagccagggcccccagaggagagaag

SEQ ID NO: 241746 - RNA, 74 nt, Homo sapiens
gccacccggggccggcgcggaggcagcgggcacggcagacgcgcaacacagagggcaggcagcacaggagggga

SEQ ID NO: 241747 - RNA, 78 nt, Homo sapiens
acagaacaacagaagaggagagaggaacccgaagaagaaaggacgacagccagagagcgagcaggcgacccaaaagag

SEQ ID NO: 241748 - RNA, 76 nt, Homo sapiens
cggcaagggggcaccggcccgcaccaagagaagaacggaacagccccaagccggaaacccaggaacggaaacagaa

SEQ ID NO: 241749 - RNA, 64 nt, Homo sapiens
cgaagggacaagacccgccagaacaggggggaggggaacagcagcggagaacacggcagagaca

SEQ ID NO: 241750 - RNA, 56 nt, Homo sapiens
gccccccaggacccgccggcgcgagaagaccgcgcgaagcggccaaacccccaccc

SEQ ID NO: 241751 - RNA, 58 nt, Homo sapiens
cgcaagacccaaacaaaaagacacgaagaggaggaagcccagccaggaacaggagaac

SEQ ID NO: 241752 - RNA, 59 nt, Homo sapiens
aaagcagaaggcacagaccaaggcccaggcgagccccaccggggagcaccggcaacaga

SEQ ID NO: 241753 - RNA, 69 nt, Homo sapiens
caagggagcagcagaaagcgcccaagaagaaccgaagagacagcccgcacggaccgggaagagaaaaga

SEQ ID NO: 241754 - RNA, 52 nt, Homo sapiens
gaaaaagaaaccacggggcccggagaccaaacccgggaaagaaaaacccagc

SEQ ID NO: 241755 - RNA, 72 nt, Homo sapiens
gcccagccccggagcgggaacagcccaaccggacacacacagaggcggacccccaccgcgaccaccggccga

SEQ ID NO: 241756 - RNA, 67 nt, Homo sapiens
ccgagaagagcagagcggagggagccccagacacgcggagccccgggcccagcaggaggcggccccc

SEQ ID NO: 241757 - RNA, 73 nt, Homo sapiens
ggcggggcggcccaccaacaggaacagggcagacgagcggaggacacccaacccgggcaccagacacgaaaga

SEQ ID NO: 241758 - RNA, 85 nt, Homo sapiens
gagaggcgcacgcgagacgcagccccggccaaacggccagacgccgacgcgaccagcagagacgaaaggggagcaagaagaaaga

SEQ ID NO: 241759 - RNA, 74 nt, Homo sapiens
gaaccacacagcagcagcccgggaacgaagcagagagaacgcgccgcaggggcggaccagaaaccggggccccc

SEQ ID NO: 241760 - RNA, 76 nt, Homo sapiens
gcagagggcagggggcaaacaagccgaccggaaaaagaaaccgcagcacggacaaggacagacagccaccaaccgg

SEQ ID NO: 241761 - RNA, 87 nt, Homo sapiens
agggagcagaggggacagaggcaccaaggaccccaagacagccccgaaggcacacaagcaccccaacgggacccaggagaccacccc

SEQ ID NO: 241762 - RNA, 75 nt, Homo sapiens
gggagccgacagccgcgccgggggccagggcgcaacgggcaggccacagggcacagagccggacagcgcaagaca

SEQ ID NO: 241763 - RNA, 82 nt, Homo sapiens
gcagccccccgcagcacccagccggccacgaccgggaaaaccggaggccagcccacccagagaggccgaaaaccggcgacga

SEQ ID NO: 241764 - RNA, 63 nt, Homo sapiens
ccggcagcaaagagggaacagacacaagcgggacggaagaggcccggcgaccggacagaaacc

SEQ ID NO: 241765 - RNA, 67 nt, Homo sapiens
gagccaggaaaagaccagaacagaccacggaagaaaaaaggaaccgcgagaaagggccaggaaagac

SEQ ID NO: 241766 - RNA, 56 nt, Homo sapiens
gcaagcaaagcaacccagaccaaggaagaggcgaacaagcgggaaccagcaggccg

SEQ ID NO: 241767 - RNA, 74 nt, Homo sapiens
gacaggcccagaacacgagcgaacaaagcaccggcaggaggagcaaagcccacagaagaaggaaccagcaaagc

SEQ ID NO: 241768 - RNA, 77 nt, Homo sapiens
gcccgggaaaagaacccgccaaaacacagcgaggagacagaggggaccagaagccaggagaggcgccgggacgggcg

SEQ ID NO: 241769 - RNA, 78 nt, Homo sapiens
ggccgcagcaccaggccgcagcgcgggagcagcacgccagccgcaaggacggcggggcgggcccgcacaggcagacaa

SEQ ID NO: 241770 - RNA, 98 nt, Homo sapiens
gagcacaaaaaaaaacgcgcaaggaccgaccaagaacaaggaccagggaaaagagcccagagcacaagcagaaaaaggaaaagaccacagaagcagaa

SEQ ID NO: 241771 - RNA, 78 nt, Homo sapiens
gccggcccagagccccgggcgccggggccgcgagaccgaagaccgaccacgaggcgggggcggaagaggcgagggggc

SEQ ID NO: 241772 - RNA, 57 nt, Homo sapiens
cagagaccagaagaaagcggggaagccagcgaacgcagggcaagagagggggccagg

SEQ ID NO: 241773 - RNA, 74 nt, Homo sapiens
gcggcaccacccccagcaccaccccagccccgcgcccgaaccgagggggcacggggaaccaccagagacacacc

SEQ ID NO: 241774 - RNA, 67 nt, Homo sapiens
gcccgccggcccccccagaacacacaggaacaaaagaaaaagcagcagaaaaccccaaaaaccaacc

SEQ ID NO: 241775 - RNA, 62 nt, Homo sapiens
cagcaagaaggaccagccacaccaaggcaagcccggacggagcccccccggcgccggcagcg

SEQ ID NO: 241776 - RNA, 75 nt, Homo sapiens
aaggacccagaaaaaggaaagacccagaggccagcagccaagcgacgaggccgcaaagggacaaggagccacccg

SEQ ID NO: 241777 - RNA, 74 nt, Homo sapiens
ggccccagggcagaggcggcgagcacgcaggccgcgccccgcccgaaagcagcaccacggaacccacacacagc

SEQ ID NO: 241778 - RNA, 60 nt, Homo sapiens
agccaggccagagcgccgaggagccggcaggacgcagcagccccagggaacccgagaagg

SEQ ID NO: 241779 - RNA, 59 nt, Homo sapiens
ggccagcggcgcagggcgggggcggggcccagccgcagcacgcagcggccaccggggcg

SEQ ID NO: 241780 - RNA, 84 nt, Homo sapiens
cggacgaggcggaagaccgcgcgcagggccgcagcgggagcggacggcgagcgcgagcggcgcgagaaagaggcagcacggcag

SEQ ID NO: 241781 - RNA, 33 nt, Homo sapiens
gggggcggaggcacaggggaacacccagaggaa

SEQ ID NO: 241782 - RNA, 102 nt, Homo sapiens
cgaagggaaagcgacaacaaaaaccccgaacagcgaaacgcagcagagcgaagcgagaggccgagagacccgcgaacgagcacaagggcaccacgcaaacag

SEQ ID NO: 241783 - RNA, 77 nt, Homo sapiens
cccgccgcgagggacccggccgggcccacgcaccgggagcggcaagaacgagcgcacgagagccacgcgagagcgcg

SEQ ID NO: 241784 - RNA, 83 nt, Homo sapiens
ccgccgaggagcgggaggaggacgggaccccggcgcccccaccccaccccgggagggaccccgacggagagacaaagaagacg

SEQ ID NO: 241785 - RNA, 76 nt, Homo sapiens
cgccaagcccaacaccagccgccgcaacacccacagcacacccacccccagccgacgccccgcagaggcgcggacg

SEQ ID NO: 241786 - RNA, 70 nt, Homo sapiens
aggcaggaccggcgcccaaggagaggccaaagggcccacagagacaggagaggccagggaaaaacagaag

SEQ ID NO: 241787 - RNA, 58 nt, Homo sapiens
gaggccacaggggccgaaacacagagcaaggagagggacccgaggagggcggcaccac

SEQ ID NO: 241788 - RNA, 47 nt, Homo sapiens
gagccaacaaaaagcaccggacggcaagcacaacagaccgagaaaaa

SEQ ID NO: 241789 - RNA, 64 nt, Homo sapiens
gacaggcccgggagcgaagaaagcgagcaccgaagaaggaaagacggccaccgggacccggagc

SEQ ID NO: 241790 - RNA, 68 nt, Homo sapiens
agaaccaaaacggccccgccgccccagaaggacagggcggccgagggcagcaaaggcacagcagccag

SEQ ID NO: 241791 - RNA, 64 nt, Homo sapiens
agacaacgaacaaacccagccagaaggagccacgccaccaccgcgcggcccacgcccacagagc

SEQ ID NO: 241792 - RNA, 63 nt, Homo sapiens
cccgccacgcacacagcacccggcaagcccgcgccgccacaggccccccagaccgcaccaaag

SEQ ID NO: 241793 - RNA, 76 nt, Homo sapiens
agccacaaagccggaggcagcagaacagagaacagagacgcaggcaagagcgcggaggagagagccaaaagaaggg

SEQ ID NO: 241794 - RNA, 70 nt, Homo sapiens
gggacaaagaagcacaccgaaaaaagagaaaaaagcgcgaagaaagcgccaaggagagaaaggccagcac

SEQ ID NO: 241795 - RNA, 73 nt, Homo sapiens
agggccgagaggacgccagcggcgcgcaggccagaggcagaggcagcaggcagcacaacagacccccaccaac

SEQ ID NO: 241796 - RNA, 87 nt, Homo sapiens
gagcagaggagcgagcgagcgccccagcgagaaggagggagaaaggcgggcccgggaacaggacagagggccgcccagcagggcaca

SEQ ID NO: 241797 - RNA, 68 nt, Homo sapiens
ggacaccaggaacccgagcccggaaagggagaagaagcaggcacagaccccaagaagacccagcggac

SEQ ID NO: 241798 - RNA, 83 nt, Homo sapiens
gaaggccaagaccaggcagcggccaaacaaagcagccaaccaacaacagagcccccaggacaggcacacccgggaaaaccgaa

SEQ ID NO: 241799 - RNA, 49 nt, Homo sapiens
aacggaaaccgacagccagggagaggcaaggccaccggcaccaggggaa

SEQ ID NO: 241800 - RNA, 41 nt, Homo sapiens
aacagaaacaaacacaccagggccagcaaaaaagacagacc

SEQ ID NO: 241801 - RNA, 69 nt, Homo sapiens
acgacacccagcgggagaaagggaaaggaaacacaacaggaacacagggggcggacgggaaaagaaccg

SEQ ID NO: 241802 - RNA, 39 nt, Homo sapiens
ccagaacgagacagcccccaaaggggacgaagggaaccc

SEQ ID NO: 241803 - RNA, 69 nt, Homo sapiens
cgccgaggccccagaacaagcggagccaccggcaccacgaacccaagaaggcagaagccagccccgcag

SEQ ID NO: 241804 - RNA, 78 nt, Homo sapiens
cgccaagcccgcaacaagaggaggcccagcaagacaagggccgcccgcgaggccaacacccaacccaccgggagaaga

SEQ ID NO: 241805 - RNA, 73 nt, Homo sapiens
gaccggaccgagagcggaccgagagcgcgaaacgcacgagaaggaaggaacaacgacgagagagcagaaaacc

SEQ ID NO: 241806 - RNA, 53 nt, Homo sapiens
caaacggaacagcgagacacgggacaaaaaccaaagcaaggagcagggacaag

SEQ ID NO: 241807 - RNA, 85 nt, Homo sapiens
cggcccccagcgcccccagcacgccgccgagcccgccgccaggacaggggcaaggccgaggggaacagcacacagagaggaggcg

SEQ ID NO: 241808 - RNA, 54 nt, Homo sapiens
gcacccgacgccaccagaaggagcggagaacggaccacccagcagcccccacac

SEQ ID NO: 241809 - RNA, 70 nt, Homo sapiens
aaaagacacaacacgcgacacaaaggagacgaacccgacgaagcaacagggaaaacgaagagagcaagca

SEQ ID NO: 241810 - RNA, 51 nt, Homo sapiens
ccagagcagggcccccgagaaacaccggggccaggacgaaaaggcccaggc

SEQ ID NO: 241811 - RNA, 84 nt, Homo sapiens
gccggccggccgcgcggggcacgcccggaaaacgcagaacaaagcgggacagacccgcaaggaagagccggacagaaggagagg

SEQ ID NO: 241812 - RNA, 79 nt, Homo sapiens
gccgaccgccgcccgccacacccgccgccagacccggggaaggaggcgaaacacggagccaaagagaaccaccgccacc

SEQ ID NO: 241813 - RNA, 51 nt, Homo sapiens
cccgccaacagagccaggaagcagcaggaaagagcacaacagcggccccac

SEQ ID NO: 241814 - RNA, 86 nt, Homo sapiens
gaacagaaggaccacaggggccgcaagccaggcaagaggaggaacgacgagaagagaggaagagagagacgcaacggagaggaaga

SEQ ID NO: 241815 - RNA, 74 nt, Homo sapiens
ggagcaagaccccgaaaccagaagggggaaaggcacaaaccgaagagcccggggcgggacgccacgaaagaaag

SEQ ID NO: 241816 - RNA, 67 nt, Homo sapiens
caaaaaggcgccaaagaagaggagcacgaaacaaagagaagggcagaaggcggcagcggagcacgca

SEQ ID NO: 241817 - RNA, 56 nt, Homo sapiens
ggcggaagcggcgcgggggaggaacaacaacggcaacagagccggcgccgggcccc

SEQ ID NO: 241818 - RNA, 75 nt, Homo sapiens
caagaggagaagacggcggcggcgagggggggcgacccacaggaccgcgaacaaggaggccacaaaacacccgga

SEQ ID NO: 241819 - RNA, 63 nt, Homo sapiens
gggcagccgaagccagcccagagggcccacaggaagacggccgagaaggcggcgaaccaagga

SEQ ID NO: 241820 - RNA, 56 nt, Homo sapiens
gcaggggggaaggacaacaaaagaggaagaagggaaacgcagaggaaaaaaaggca

SEQ ID NO: 241821 - RNA, 81 nt, Homo sapiens
aacgccagaagcgaccaaccgcgcgcaggaaaagacccaacagaggaagccgcaagaaacgggacgacaggaaggccagag

SEQ ID NO: 241822 - RNA, 65 nt, Homo sapiens
agaggaagcaggaaaaacaaagaagacccagagccaaagcagacccccaagcgagcggagcggaa

SEQ ID NO: 241823 - RNA, 73 nt, Homo sapiens
gcccaaagaaccaaccaagggcaccgacgaggcagagccaaggaggcagcagaccggcaagccagggggaaaa

SEQ ID NO: 241824 - RNA, 57 nt, Homo sapiens
cgcggggggagacggcgcggccgcaacccacagagagagaggaaacgaagggagcga

SEQ ID NO: 241825 - RNA, 83 nt, Homo sapiens
cgaggggccaggggggacacggggagcgcgccgagcggagaccggacgcacccggaggagaagaggcgcggaacaagcgggag

SEQ ID NO: 241826 - RNA, 62 nt, Homo sapiens
aagcggcggccaagccgaccccagggcagacgaagcggcgggccggagaagagaccaagcag

SEQ ID NO: 241827 - RNA, 58 nt, Homo sapiens
gaaaagggcaagaggcagcaggacaggagcgaaggaaaaaacagaagacgcagcccag

SEQ ID NO: 241828 - RNA, 83 nt, Homo sapiens
agaacagcagcagcgccaacacaccacgccagcgcaagcggcggaagccgggcagaaaacgacccggaagggacaccaccccc

SEQ ID NO: 241829 - RNA, 32 nt, Homo sapiens
caaagaacgaccgaaagacagaagagcagcac

SEQ ID NO: 241830 - RNA, 71 nt, Homo sapiens
acccggaggaggaagaagaaggaagccaaagaaggcagaggaagaaccagccaggggaccacagaaaacca

SEQ ID NO: 241831 - RNA, 84 nt, Homo sapiens
gccaaccgcaaccagacgccagcgggacgaggaccgagaccgcggccgggaccgagggcaccgccggccgccacaaccggagaa

SEQ ID NO: 241832 - RNA, 69 nt, Homo sapiens
cagacaaggaaacagcagaaaccggaaccacacacaccacaggaagccaaggcgacccgcggcgagagc

SEQ ID NO: 241833 - RNA, 68 nt, Homo sapiens
gaacaaaagaaaaccaaagcagaccagaaaaaacagcacaccaggaagcaaggaaccacgaaagagca

SEQ ID NO: 241834 - RNA, 62 nt, Homo sapiens
ccggggaggcaccgacgaggaggacagcccagagcaagcacacggaggcccgggagccagac

SEQ ID NO: 241835 - RNA, 82 nt, Homo sapiens
cacgcacgggaaccggaccaggaggaggcaggaccaaaagggaaaagcaccggacagaagccgagaggagacccccccaccg

SEQ ID NO: 241836 - RNA, 53 nt, Homo sapiens
agcgccaaggaccggcaaggggccggagcgagggagagcaggaacacagagag

SEQ ID NO: 241837 - RNA, 81 nt, Homo sapiens
caccgaccgagaaggcccgaggaggacgggacccgcccacagacagccccaggagaaagccagcagcgagcgccaagacgg

SEQ ID NO: 241838 - RNA, 87 nt, Homo sapiens
cggcccaacagcaacacagaagcaggaacacagcccagaagggggagcggaggacaccccggagaggacgggaggacggcagcacag

SEQ ID NO: 241839 - RNA, 68 nt, Homo sapiens
aggcaagggaaaaccccacaaaaccagaggccagggggcagaacagggaagccgacagcaaggcggaa

SEQ ID NO: 241840 - RNA, 108 nt, Homo sapiens
ggggcggagcggaggggaggccggccaggcagggccggcggcggaaccgccaggccgagccggccgccacggggaaaaagcgggaccgcagccagcacaacaaacagc

SEQ ID NO: 241841 - RNA, 81 nt, Homo sapiens
aacacagggagaccacagagaagcacacacagagcagacaccaggccgggcacacaggcggcgagccagaggccaacgcag

SEQ ID NO: 241842 - RNA, 80 nt, Homo sapiens
cagagaagaaacaacacaaggacccacagcagacgaaggagacaaaacggacagcaggaacagagcaaagaggggcgggg

SEQ ID NO: 241843 - RNA, 56 nt, Homo sapiens
gaagccgagacaaacggcaccaagagacgggacagagcgagagagaccacgagagg

SEQ ID NO: 241844 - RNA, 81 nt, Homo sapiens
cgcagcagcggggaggagccaaagcccggcgccaccaagccgcagggagaacacccaacgggagggagaagggcacccaac

SEQ ID NO: 241845 - RNA, 77 nt, Homo sapiens
gagggccaaaggccacgagcgacccccggagcaccggggccaccaggagggagaaacagacaagcaagcagagacac

SEQ ID NO: 241846 - RNA, 79 nt, Homo sapiens
acgggggagaacaaagcgaggccagagaaagagaagcggcacccccaggaagcgcggaaagaaagcccaacagcacagc

SEQ ID NO: 241847 - RNA, 80 nt, Homo sapiens
ccggaaccagcgccagcccaccggaaggacacagcgggcaggcggaacacggaccgcgaaggagcagagagagcgacaac

SEQ ID NO: 241848 - RNA, 73 nt, Homo sapiens
ggaaaaacgccacgcaccggagagagcacagggcggagaacggaaaagcaccaggaagcagagaggaccgcag

SEQ ID NO: 241849 - RNA, 80 nt, Homo sapiens
cagacagcaacacgaaccgggaaggccccacaagggacggaagagaaagagacaacaagggaccgggccgggggccgagc

SEQ ID NO: 241850 - RNA, 69 nt, Homo sapiens
gagaccccaaccgcagagcgcccgagagaagcacgggaccaagagcgccgggaaaacgagcgacggaaa

SEQ ID NO: 241851 - RNA, 63 nt, Homo sapiens
acgaaagcccccaagggagaagggacagaagaagaagcccaaacaccggccccacacaccaaa

SEQ ID NO: 241852 - RNA, 50 nt, Homo sapiens
cacaaccacgaaaagaggagggacccccgaacccggaacaggcacccacc

SEQ ID NO: 241853 - RNA, 79 nt, Homo sapiens
cacgccaggccggaggaagccacccgacgaggaagcaaaaaaggagacgaggacgcgcacaggaaaggacgcggaacaa

SEQ ID NO: 241854 - RNA, 72 nt, Homo sapiens
cggaaaaaacaaaaggagagcgccaaaccaacgagagggaggaacagcaccggcgccaacccccaacccacg

SEQ ID NO: 241855 - RNA, 78 nt, Homo sapiens
aggacgggaggcccgagaaggaggggagagccacacaccccgaccacgcggccgagaggaagagaccgagaccaggaa

SEQ ID NO: 241856 - RNA, 81 nt, Homo sapiens
agcagcaccagcccaagagaaggcaagagcaacgaaccaaagcaaaggaggccgggggaagacggaaaagagagacggggc

SEQ ID NO: 241857 - RNA, 64 nt, Homo sapiens
gaaagaaggaagcggcgccgaaaaaaaggggaagaagagcccgaagaagaaccgaagagacagc

SEQ ID NO: 241858 - RNA, 81 nt, Homo sapiens
ggcccggcacgccacaaaccaagccaggaccaggaccggcccgggaccgggagcccgggaccgggagccggggggccaccc

SEQ ID NO: 241859 - RNA, 63 nt, Homo sapiens
cggcaaggccacgcgcaaccgggcccgcccgccgggcggccgcgagaaccgggcagagcagcc

SEQ ID NO: 241860 - RNA, 72 nt, Homo sapiens
cacacaacccaagcgccaggaccgaaggagaccagaacacacaagaaccgggagaacgaacaaaccaagcca

SEQ ID NO: 241861 - RNA, 86 nt, Homo sapiens
caacaccggacaggacaccgggcagccgcacaaacacgcagaggcaagaagagaggcaggagggccgggacgggagaggggccgaa

SEQ ID NO: 241862 - RNA, 55 nt, Homo sapiens
gaaccagcaacaagccgggcgcggaggaaagaccacgaggaaacaggaaaaccac

SEQ ID NO: 241863 - RNA, 71 nt, Homo sapiens
aaccaccgcagacacagaggggcgaacgcacggaaaggcgagacaagcccacagcaccagcgggccgagac

SEQ ID NO: 241864 - RNA, 75 nt, Homo sapiens
cagaagaggcgccaggacgaaggcccacgggcaaggggccagagaacaagcccagacagcaagacgcgagcgcag

SEQ ID NO: 241865 - RNA, 66 nt, Homo sapiens
cacagacgcacgggacaggagagccgggcaagacggagagcgccccacaggaagcccgcagaaggc

SEQ ID NO: 241866 - RNA, 70 nt, Homo sapiens
agaggaccaacagggcagagagcaagaaccaacgcaacccgacacgcgaagaccaaccgaacgccggcaa

SEQ ID NO: 241867 - RNA, 67 nt, Homo sapiens
gcagggcgccggagccccccaggccgcacacagaaaaagaacaaaaccggaggaccagacacaaacc

SEQ ID NO: 241868 - RNA, 111 nt, Homo sapiens
caggagcagccgaaggcgaccaagacgcggcccaagggcccggcggcgcgagcaggaaggacccaccaacaaccgaaaacaggggaacagaagcaggcggcagagacagcc

SEQ ID NO: 241869 - RNA, 87 nt, Homo sapiens
cggcaaaaggcggcgccgaggagcgggacaacccaggagcagacagagaagcgcgcagcagaacgccaaaagacgaacacaaaggga

SEQ ID NO: 241870 - RNA, 35 nt, Homo sapiens
cggggggaccgcacgggaaagggccagggaaaaca

SEQ ID NO: 241871 - RNA, 75 nt, Homo sapiens
gcagccagagcggagggccccccgagccaacggcaagaacaagccaagacccagagaaccagagaggacaaccaa

SEQ ID NO: 241872 - RNA, 72 nt, Homo sapiens
ggccggcgccgcggccgcggaaagcccgcgccgaccccgccgccccccagcgcgcagggcccccggggacac

SEQ ID NO: 241873 - RNA, 38 nt, Homo sapiens
gcgcagccagcaccagccacccggagaaaggccacggc

SEQ ID NO: 241874 - RNA, 39 nt, Homo sapiens
gcaccaccaggacagcggaggcaacacggaaaccgagga

SEQ ID NO: 241875 - RNA, 70 nt, Homo sapiens
gaaacaaaacgcacggaaagacccagaaagccaagacaaaagaaagacgaccgccaaccagggagaacac

SEQ ID NO: 241876 - RNA, 57 nt, Homo sapiens
aaggcgcaaggcgacgaaaggagaccgcgccgaggaggccaaaacagaagaggcaaa

SEQ ID NO: 241877 - RNA, 84 nt, Homo sapiens
cagggacaggaaagggcacaaggaagacagagcgccgccaccgccgccaccacggagcgagaagcccagaagacgccccggcgg

SEQ ID NO: 241878 - RNA, 73 nt, Homo sapiens
ggggaaagaggcggcgggagacagcgccacagccgccagcaccggacacacaccggcagccgcaccaccgccg

SEQ ID NO: 241879 - RNA, 82 nt, Homo sapiens
gaaaacaaacaagcggccacccgaaagacagaagccaaaacaggaaccgaaaggccaagcaaccagaaagaaaacagcgagg

SEQ ID NO: 241880 - RNA, 53 nt, Homo sapiens
gggccgcgccgccgcgccgccgccgcgcgcggaaacgaacaccgacgaggcac

SEQ ID NO: 241881 - RNA, 72 nt, Homo sapiens
gacggacaagagcgcggaacaggacgccccgagagaaccagccaaaaaagggcagaaccgacaacggggacc

SEQ ID NO: 241882 - RNA, 53 nt, Homo sapiens
gacagggcaccaccagcagcagcggggccgacgagaagaacaggaacaaccga

SEQ ID NO: 241883 - RNA, 79 nt, Homo sapiens
caggaacgggcagagaaaacaaacggacagcccagggccggcacgggccggaccacagaaggcccaacaccaaccgccg

SEQ ID NO: 241884 - RNA, 81 nt, Homo sapiens
gagcccgcccccgaggcgcagaagggagaggaagaaaaaagcgggcacgggcagcacaaagccggagggcgccgggcacgg

SEQ ID NO: 241885 - RNA, 64 nt, Homo sapiens
cagcaccacggagcacaagagaccgacccgcgcacagccagggggaccccagagcagcggcacg

SEQ ID NO: 241886 - RNA, 64 nt, Homo sapiens
acggcggcgcagaaaagaccacgcgcacaaaccccacgggccacaggagcccagcaaggcaccc

SEQ ID NO: 241887 - RNA, 81 nt, Homo sapiens
aggacacagcccgcggaggcagcgaaaccagggggagaccgcaccaggaggaaaacagagacaaagacaacgaaagagaca

SEQ ID NO: 241888 - RNA, 79 nt, Homo sapiens
ccgaccggacacagggagagaagaagaaggaggccgcggccagaaacccaagaaaaagcgaaggaacgcagagcgaaga

SEQ ID NO: 241889 - RNA, 81 nt, Homo sapiens
caagacaccacggacgagagacaaacgccgaagagcagaaaagcgaggcaggccccagccgcccaggagaggacagaacgg

SEQ ID NO: 241890 - RNA, 89 nt, Homo sapiens
cgaccccccccgggagagcaagccgggcggccgccccgccggagcagcacacaagaccgacagaacaagcgcaaaaaaagaagagcaga

SEQ ID NO: 241891 - RNA, 53 nt, Homo sapiens
gaaacccgcagaggaaaacaggcaacgcccgcgggcaaacgggcacacaccag

SEQ ID NO: 241892 - RNA, 72 nt, Homo sapiens
cagcggagcaaggaaaccggagaggcggagccacaagcacgcggaagagccaggacaagcaaggggccaagg

SEQ ID NO: 241893 - RNA, 77 nt, Homo sapiens
gggggagcgccggagcccccaggagaacaccgaaggagaagccaagccaggcccaggaaggagccgacgcgacgagc

SEQ ID NO: 241894 - RNA, 70 nt, Homo sapiens
aaaccaaacaccgaccgggaccaaccaacaggaaggggaaaaccgccgccacccaagacagcggggcagg

SEQ ID NO: 241895 - RNA, 85 nt, Homo sapiens
gcccgaagggagcgggaggaggcgcaccccacaggacaggaaaacaggaggcagaggaacaaaaaaagacaccacgagaaacaga

SEQ ID NO: 241896 - RNA, 78 nt, Homo sapiens
acggcggcagcagcggcacagacgaggggacaacgaaggaggcaagcaacaaagggacaaaaacgacaagcaggaagc

SEQ ID NO: 241897 - RNA, 70 nt, Homo sapiens
gaaaagcgagaagagagaagcacacacgaagccagaaaaacggcgaagcaccaggagacaaagccacaaa

SEQ ID NO: 241898 - RNA, 56 nt, Homo sapiens
cgaaagaacgcagaggcccacagcaaggaccagcaaccaaggcgccagcccacgga

SEQ ID NO: 241899 - RNA, 80 nt, Homo sapiens
gggggaggccgcaccgcagcgaggccaggaacccggggagaccccgacgggaggccgaggcagacaacacagacgacagg

SEQ ID NO: 241900 - RNA, 78 nt, Homo sapiens
gcggagcacgagccacggcagaaccaaacccaccgcaagacagggaagcgcgaagggagggccgccccaaccgacgca

SEQ ID NO: 241901 - RNA, 76 nt, Homo sapiens
ccagcagagaaaacagaaggagaccagggaagggccaggggcaaaagcagcgagagcaagcagaacggaacgcgag

SEQ ID NO: 241902 - RNA, 86 nt, Homo sapiens
ggccacaggcgcaagcagagcccgaggagagacaggaaggccgaaggagagaaaaaaaccgaggcgccagagaagcggaagaagca

SEQ ID NO: 241903 - RNA, 53 nt, Homo sapiens
caaggggaaccaggcgcccacaggcgcagggagcaggagaagcggagcgaagg

SEQ ID NO: 241904 - RNA, 88 nt, Homo sapiens
gagcgagccggagcgccagcccaccggacacgagacgggaaacgaaagagcccagacacccaagagggccaagccagaaaacagaaac

SEQ ID NO: 241905 - RNA, 58 nt, Homo sapiens
gaaaaggaaaccccaaagggaagggggcggaggacggaaccagggagcccaagacaaa

SEQ ID NO: 241906 - RNA, 71 nt, Homo sapiens
gggcgagagcaccgccaggaaccaccgaggagcggagcgcaagaagaaggccgggggcacgccgcacgcaa

SEQ ID NO: 241907 - RNA, 76 nt, Homo sapiens
gccagggaacccggcaccgccccagggaaacacaaagaagacaccagaagggccagcaccacgacaacacggcgac

SEQ ID NO: 241908 - RNA, 76 nt, Homo sapiens
cagcccgggcgggggcagagccagcaagaaaccccagcggaccacgcaacacgaacggaaagaaaccggaggaaag

SEQ ID NO: 241909 - RNA, 56 nt, Homo sapiens
gaccaccgcagcaccagcgcgggccgaaacacaggggaaacacgagagagcaacag

SEQ ID NO: 241910 - RNA, 109 nt, Homo sapiens
aacgccccgcccagggccacgccacggccaagcaacccggaagaaaccgccacagaggggcagggcgaggaaaggagacggcaccaaccaaagggaggcaggaagaaag

SEQ ID NO: 241911 - RNA, 73 nt, Homo sapiens
acgcccagcgagggacccgcagacaggcgggagagaaccgcagcaccccaggaaagcgcagaaaaggccccaa

SEQ ID NO: 241912 - RNA, 85 nt, Homo sapiens
ccgagggaagaccacaaccacgaccacaaaccggcggagccacaggcaaacaccagcaacacccgggacaaaaacgggggccacc

SEQ ID NO: 241913 - RNA, 103 nt, Homo sapiens
gcaccgcgcccggagccacgccccacgcacgcaccaaccgaggcaacggcacagccccaggcaccaccgcacccacgccagagacacgaggccgaagccgggc

SEQ ID NO: 241914 - RNA, 83 nt, Homo sapiens
cgaggagccgacgagacaaaacgaaggaggcccaaccacaaaaggagccgacggaacccagacggagaacaaaaggaagaaag

SEQ ID NO: 241915 - RNA, 57 nt, Homo sapiens
aagaaggccgcaaaagggccaaccgccccccagcagcaggcacgggcgaaccccgag

SEQ ID NO: 241916 - RNA, 53 nt, Homo sapiens
gcagacgcagaaggagcacagcgagagagggacgcagacgccgacaaacacgc

SEQ ID NO: 241917 - RNA, 77 nt, Homo sapiens
cacacgggccccaggcaccggcaagacgcacgagggaggcaaaagcaggacacggaccgaaacccaggcccccccac

SEQ ID NO: 241918 - RNA, 77 nt, Homo sapiens
cccccggaaaaggcccacgccgggcgaggcgaaccacgggaacaaaggcgaggacaaggagggcaggggacgggacc

SEQ ID NO: 241919 - RNA, 66 nt, Homo sapiens
gacggacaagcacagccggaaggagaggcggaaaaaagccaagaaaaaaaaacagaagaagaaaga

SEQ ID NO: 241920 - RNA, 68 nt, Homo sapiens
cggccccccacgcgcacacaagggagcccccccaccacccccgagagacggcccaccgaaggaaacac

SEQ ID NO: 241921 - RNA, 80 nt, Homo sapiens
cgagaggaccgcacgccgccagccagcaggaaccaaagcggacagagagggcaccggaagaagacaaaaggacagcgaca

SEQ ID NO: 241922 - RNA, 72 nt, Homo sapiens
aaagaagcagcaaccgaaaggcgagggaaaaagacggaaccggggaccacgggaaagcccccgcagccggca

SEQ ID NO: 241923 - RNA, 72 nt, Homo sapiens
agaaccgcaaccgaaaaacaccaggcaccagcaacgaaccgcacggagaaccacggggaccaagaagcgagc

SEQ ID NO: 241924 - RNA, 75 nt, Homo sapiens
accccagacgacacaaggcacacggggcacccggaccggagaggaggggagggccagggagcagaagacccaaaa

SEQ ID NO: 241925 - RNA, 75 nt, Homo sapiens
gaaaacggcacaggcacaaaacgccagcaagccccgggggggaccacgcaggccacaaaccgagacacaggcagc

SEQ ID NO: 241926 - RNA, 79 nt, Homo sapiens
caccgcggagcaaaaaaagagcccgcaagaagaacagagacagcagccaaacccccaggcagaagagacaacacagaaa

SEQ ID NO: 241927 - RNA, 72 nt, Homo sapiens
gcacacaggaccccaagcccaagacaagaggacggcggcaaaagaacccagaacgggcggccagcggcgagc

SEQ ID NO: 241928 - RNA, 74 nt, Homo sapiens
aacaaccaggggaggaacaagagcgaaggacaaacacggcaggcagcaggagaaacgagaagaaacagacgcgc

SEQ ID NO: 241929 - RNA, 77 nt, Homo sapiens
agcggggcacgacaaaagaaccagaaaaagagaaggaggcgcgagagcccgacaaggagcggcagaccgagacagag

SEQ ID NO: 241930 - RNA, 82 nt, Homo sapiens
cgggccggcgccggcgcgcggagaaccacggggcagagcagggcggggcagggcgaccccgggggaaccagggcagcaagcc

SEQ ID NO: 241931 - RNA, 70 nt, Homo sapiens
gcggcaagcacgcaggcccaacgacggcaggggaaaaacgaggccccccaaaccacgagagaagaaagaa

SEQ ID NO: 241932 - RNA, 76 nt, Homo sapiens
gaagagcgacgcgggcccaggccaaaccaaacggagcgggcagcaggaagggacggcgcgcggcagcagcagaaac

SEQ ID NO: 241933 - RNA, 79 nt, Homo sapiens
ccaccagcagcccccagagcggaacacagcacacacagaccagccaccacaacagcggcacagaagacccggcgggaga

SEQ ID NO: 241934 - RNA, 71 nt, Homo sapiens
aggccacagggacagagagagaagacagaagaaaaggaccggagagcaaggaaaccccagaagcacgaaac

SEQ ID NO: 241935 - RNA, 65 nt, Homo sapiens
aaggacagaacaggagggaacgacagagaggaaaggcaggacaggaaccgcagaccagcaaaccc

SEQ ID NO: 241936 - RNA, 80 nt, Homo sapiens
acacagggacccacggccagagcccggagcaggaaaaacacagagacagacggcggcagagcccaaaaggcagagcgagg

SEQ ID NO: 241937 - RNA, 49 nt, Homo sapiens
gaaaagagaaacaaggagagcccaaaaggcagagcgaggagagaagaag

SEQ ID NO: 241938 - RNA, 82 nt, Homo sapiens
acaaggacagggcaagcacgccagaaaaccaagagaggcccaagcaacagcccccaccccaacacaccgggcccgcgcccac

SEQ ID NO: 241939 - RNA, 40 nt, Homo sapiens
ggcaaacccgagagaacggacaaacccagaaagagaaaga

SEQ ID NO: 241940 - RNA, 78 nt, Homo sapiens
gcggcacggagaccacaggcgacgcgcacgacgacaccgaagaacggccgcggaaaaggccagaggaaccaagaacca

SEQ ID NO: 241941 - RNA, 75 nt, Homo sapiens
ggaaaagagacgcaaaccacgaggacagagaagagagaagccaccagcaaaagagccaccagaaaggaacagaaa

SEQ ID NO: 241942 - RNA, 50 nt, Homo sapiens
acgcgagaggaagacacccgaccgacaaaaggcgacgccggaccgcgaag

SEQ ID NO: 241943 - RNA, 77 nt, Homo sapiens
caaggcggcgcgggagcccggcgcggcaagggccccagcccccgcagacagcacagaggaccaagacaagagaaaag

SEQ ID NO: 241944 - RNA, 65 nt, Homo sapiens
ggccaaggggcggcaaaaaggcacggaaggacgagcgcacaggagccggaggaaccacggacaac

SEQ ID NO: 241945 - RNA, 77 nt, Homo sapiens
cgaggcgcgacaggaacgaccaaacgacaaagaggcggagaaaaaggcagaaggaagaagaggacccaaaacaagca

SEQ ID NO: 241946 - RNA, 53 nt, Homo sapiens
gggcacagaagccaccaagggccagaagcaaccagaaccgaagaccgccagca

SEQ ID NO: 241947 - RNA, 57 nt, Homo sapiens
ggaccccagccgcgcccgggagagcaagggcaacgcccccagccccccacccccgac

SEQ ID NO: 241948 - RNA, 52 nt, Homo sapiens
gcaagggaagaaaagaagacagccagaggggggagaagggaccaggaagaca

SEQ ID NO: 241949 - RNA, 64 nt, Homo sapiens
aggagacgcccggcacgcaggcaggaacagaaaacacccaagaagaagaaggagaacagaagag

SEQ ID NO: 241950 - RNA, 88 nt, Homo sapiens
aacaggacagaagaggaggaccaccggagcgaggaaccggaccccggcagcgagcacagcaagcgggagcaggcagaccaaaggaaca

SEQ ID NO: 241951 - RNA, 84 nt, Homo sapiens
gacaacaaagcgcgggaacaaagcagcccaggcagaccccagggaccaagaaaggcccagggaccaaagcccggacaaggcccg

SEQ ID NO: 241952 - RNA, 74 nt, Homo sapiens
aggaaacagcaagcgaagccgaaaaagcgcccgagacgggcccgccgaaaggcgggaaaacggcacaaggcgac

SEQ ID NO: 241953 - RNA, 73 nt, Homo sapiens
gaacaagcgaaggagggacggaacggagacccagagccgccggccgacgagacacgccggaggaaacagacgc

SEQ ID NO: 241954 - RNA, 76 nt, Homo sapiens
gaagcgggaaaaaggcggggccgccgcccccagcgcgcaacccaggaacccgggagaaggaaagagcagcgaaaca

SEQ ID NO: 241955 - RNA, 79 nt, Homo sapiens
agcagcagcagagcagccacgagagacagcaggccgagcccgagcgcgggaagaaagagaggaaggaacaccaggcccg

SEQ ID NO: 241956 - RNA, 74 nt, Homo sapiens
aagagcaggaaaggagggcaccaaccacaaagacaagagagggcggcagaaggaacaccgagaaaccgcacacc

SEQ ID NO: 241957 - RNA, 41 nt, Homo sapiens
gcccggcggacgccgcgcccagggcggaacagaacgacagg

SEQ ID NO: 241958 - RNA, 73 nt, Homo sapiens
gaccagagccgggaccccagccagaaaccaaagagccaggcgacccccgcgcccgaggcccagaaggggacaa

SEQ ID NO: 241959 - RNA, 81 nt, Homo sapiens
cgaaccggcgcccaaccgggaggggccgccggaaggagccaagagcagggggagacagaacgccagcgggccgacggagcc

SEQ ID NO: 241960 - RNA, 68 nt, Homo sapiens
gcgcacacgcagagccacggccaacagagaacaaccaagggccacgcgcacaggggcggcagggggac

SEQ ID NO: 241961 - RNA, 68 nt, Homo sapiens
gggagaagccaacggagacccaaggcaacaagaaccgaaggcaaagggcaaaagcccaaaagcaaagc

SEQ ID NO: 241962 - RNA, 53 nt, Homo sapiens
ccaaaaaaacggcggaaaaaagcggagaagagggaaagcagagccaagagaac

SEQ ID NO: 241963 - RNA, 71 nt, Homo sapiens
aaccgcagggaccacagcaccgaaaacaccaggaaagacaggagaccaaaaagggggcgaggaagagacag

SEQ ID NO: 241964 - RNA, 51 nt, Homo sapiens
cgaggcaacgccccagggccgcgagggcccggaacaggggcacgcacgagg

SEQ ID NO: 241965 - RNA, 60 nt, Homo sapiens
aaagcacaggaccagccgaagaccgcaaaaaagccagccggaccccaagccccaagacac

SEQ ID NO: 241966 - RNA, 72 nt, Homo sapiens
gcacgcgcgggccaggggcagaacaccagcagaaacaacggcagaaagagagcccggccaaccgacaccgca

SEQ ID NO: 241967 - RNA, 67 nt, Homo sapiens
gcgcgggaacggcgcggaaggcagcacaggaaagaacaggacaccaggcccgaggccacgggacaga

SEQ ID NO: 241968 - RNA, 62 nt, Homo sapiens
ggaggagcagcagaggggcgagcaggagcgaccgcgccaaacaggcgcgcccgcggcggcgc

SEQ ID NO: 241969 - RNA, 76 nt, Homo sapiens
cagcacgacaggcaaggacgaagaccgcgagggggagccccccagacccgaaaggagacaagaggacagccgcacg

SEQ ID NO: 241970 - RNA, 70 nt, Homo sapiens
caagcacacacaggcgcgaaacggaaaaagggagcaaggcaacagcaccccggaaacaagggagagggaa

SEQ ID NO: 241971 - RNA, 81 nt, Homo sapiens
gcacgagcggaggggacacgggcggaaccccggaaccagaccgcgaccgcacaagcagccgccagcggaaccaagcggcgc

SEQ ID NO: 241972 - RNA, 77 nt, Homo sapiens
gacgaacggggcggggacaggcacgggggacggcagcgcgcagggcggcggaggaagccaggaagcagcccgggcag

SEQ ID NO: 241973 - RNA, 52 nt, Homo sapiens
gccagaaaaaacgagccacaccaaacaccgacaaaaggaagccccaggacca

SEQ ID NO: 241974 - RNA, 84 nt, Homo sapiens
cagagcgacagcggcgagcagaacacggcgagcgggaaaccccacccaggaaagaaccacaggaaccagaggaacaagacggcg

SEQ ID NO: 241975 - RNA, 67 nt, Homo sapiens
gggggaggccggggcagccgaaagaggcacgccagagcacccacgggccagaaaacaagacgaagag

SEQ ID NO: 241976 - RNA, 71 nt, Homo sapiens
aggaacagcggccaaagaagcagagaagaagaagcgccgccgaaggcgaggagggccccgagggcagaagc

SEQ ID NO: 241977 - RNA, 76 nt, Homo sapiens
gcaaagggcacaccacacgcaagaggaaaaagaaaggggaagaacaggcaaggaagggaggcgaggaggagaaaga

SEQ ID NO: 241978 - RNA, 75 nt, Homo sapiens
ggagagcagggaaaggacgcacccgcgcccaaacaggagcgaaaaccgagaaagggggcagcaaggcccagcccc

SEQ ID NO: 241979 - RNA, 56 nt, Homo sapiens
ggacaagacccacagcaaagccagcgacagaagccagcgcggggaacagggaggga

SEQ ID NO: 241980 - RNA, 77 nt, Homo sapiens
caacaaaaaagaagacggcgcaggagcgggacgacgccagggcagcaagcccaggccccaaggacagaaacacccag

SEQ ID NO: 241981 - RNA, 74 nt, Homo sapiens
gagaaaggaggaagcacgagccgacgaggcagggaacccaccacacagaaaccaggcagaagacgagaacgggg

SEQ ID NO: 241982 - RNA, 59 nt, Homo sapiens
ccagccggcgggccaggaggagaacccaggcagcaccagggccaaaagaagaccaggga

SEQ ID NO: 241983 - RNA, 91 nt, Homo sapiens
ccacggggagcagaccggaggaggcgggggcgccggcagaggaccaggcaccaccggccccggaaggaagcccggggcggcgacggagcac

SEQ ID NO: 241984 - RNA, 89 nt, Homo sapiens
gcgcgggcgcgcaccaaggcgcggccaacgacccacccagcaggagaacggacccggagcagcaaagggggcaccaaggcccggcaagc

SEQ ID NO: 241985 - RNA, 72 nt, Homo sapiens
gacccggcaccacacgcagaacgggcggacgggcgcccagccaggaaaagcccgaggcccccagaagcccag

SEQ ID NO: 241986 - RNA, 74 nt, Homo sapiens
gaacggcagcaacgagaagcacagaaacccgagaaacagaaaggcaaacaaaccaccagaaaaaacagaaaaag

SEQ ID NO: 241987 - RNA, 79 nt, Homo sapiens
ggagcaccgcgcggcggcacacaacacggcgcaagcggcgcgccagagcggcacgagaccagagcccggaaggccaggg

SEQ ID NO: 241988 - RNA, 86 nt, Homo sapiens
cacaaaagaaaccaaacacagaaaacaccagcaggcggaggaggagagaccgccgggcgcaggcacaggaacaagccaccacccag

SEQ ID NO: 241989 - RNA, 66 nt, Homo sapiens
acaccgaagacaagcccaaagaaagaccaccacaacccgcaacgccacagcgagaacagaccaccc

SEQ ID NO: 241990 - RNA, 73 nt, Homo sapiens
acgacgccgggaccgggaccgccgccgccgccgccaccagaaaaggggaagaaggccaaccgggggccaaggg

SEQ ID NO: 241991 - RNA, 72 nt, Homo sapiens
gggcacgagcaccgccaccaggggaagggggaggcgcgcccaaggcgggccccgaagaaacgaagacaggca

SEQ ID NO: 241992 - RNA, 54 nt, Homo sapiens
aggggacggggacacaagagggaaaccaggaaccggcgccccaccagcccagcc

SEQ ID NO: 241993 - RNA, 71 nt, Homo sapiens
gacggggagcccaaagcaaagggacaagcgcacagcggagaaagcagcgcggccaggaggcgggaaagcgc

SEQ ID NO: 241994 - RNA, 82 nt, Homo sapiens
gcgcggccgacggcgcgcgcccgcgcgcgcggcggaccgaaggagaagaaggagaaggggaggagaaggcaagccggaaaga

SEQ ID NO: 241995 - RNA, 83 nt, Homo sapiens
cagaaaacacagacaggccaaggagacaccagcaccccaagaagaggccagaaaaggggcgaggaccccccaccccgccaccc

SEQ ID NO: 241996 - RNA, 77 nt, Homo sapiens
cgacccagcccggagcagcagccgcgcagaggcacccccagcaggacagcacacccaaccagacacaccaccccaca

SEQ ID NO: 241997 - RNA, 76 nt, Homo sapiens
accgcagcgacaagaacgcaggacggccgcggcaccgaaccacaaggaggacgagccagcagaccccgcaccggac

SEQ ID NO: 241998 - RNA, 83 nt, Homo sapiens
cgcaagacgggccgagaagcagcgcgaggggcgacagagcgaaagaaacgagccaggccaagacgggaaagcacccacaaggg

SEQ ID NO: 241999 - RNA, 68 nt, Homo sapiens
aagaacgaagggaagcgcagaaaggaaaacaaaggagcacaggaaaacacaggggaaacacgagagag

SEQ ID NO: 242000 - RNA, 123 nt, Homo sapiens
aggacccagcgggggcagcgcgagaggcggggacccgccgaacggcagccccaagaacggaaaggccaagaccggcccagacaggagggcggcagggggggcagggccgcacgggccgcggca

SEQ ID NO: 242001 - RNA, 80 nt, Homo sapiens
ggggggccacgcgacaagccccgaaacagccccggagcaaccacagagcagggcggggcacggaagagccggggagcaag

SEQ ID NO: 242002 - RNA, 84 nt, Homo sapiens
caccagggcagagccccccagaacccacaggccagcagaagaggaccagacgcccgggggggcggcggcccacagaccgccacc

SEQ ID NO: 242003 - RNA, 50 nt, Homo sapiens
ccacgcgcggaaggcagcgcccagcagcgcagggggagcgacacccaaca

SEQ ID NO: 242004 - RNA, 78 nt, Homo sapiens
cggccgaaggcgaacgccgcggccaaggagccgccaaagccagacgcacgagacacgagacaggagagaaaggagaga

SEQ ID NO: 242005 - RNA, 71 nt, Homo sapiens
aggacagcaaaaaccagggcccacagaggaggaacggacacagggaggaccaagaacccggaggaggggag

SEQ ID NO: 242006 - RNA, 73 nt, Homo sapiens
agccagaaacagagacagcaggggcgaaacccagcaagagggaagcggaaggccgggagaccaggagcagggc

SEQ ID NO: 242007 - RNA, 79 nt, Homo sapiens
ccaagcgcccagccccgagacggcaacgaggccccaccccgccccgcagcaacaagaggagccgccagaggcgcacaga

SEQ ID NO: 242008 - RNA, 58 nt, Homo sapiens
acgggaaagcgaaaaccaggccgggcagaaagggaagaaagaaggggacaaagcgaac

SEQ ID NO: 242009 - RNA, 74 nt, Homo sapiens
gcacagcccgcgcccgccaggcgacaggggaacagacagaaggagcaggaaccaaagggccccagcagccgagc

SEQ ID NO: 242010 - RNA, 72 nt, Homo sapiens
acagaggagccacacccccagccgggccccgaggaccgagacaggagcacccgggccgcacagcaaggaccc

SEQ ID NO: 242011 - RNA, 95 nt, Homo sapiens
gccgcggcggccgggaaggcgacccggcggcgggaggccacgccagccgccaggcggcgcaggggagcaaaaccagaagaacaaaaggaaagccc

SEQ ID NO: 242012 - RNA, 88 nt, Homo sapiens
caccgccacaagacacacgccgccgccgaggcgccgcgaggagcggccgccaacgccgggcccgccagaggccccaccacccagaccc

SEQ ID NO: 242013 - RNA, 76 nt, Homo sapiens
agagcacacggcaccgagggaggcagggaacaaacggaagcggagaaagagaaaacaaagaaccgagcgagaagcc

SEQ ID NO: 242014 - RNA, 81 nt, Homo sapiens
gagcagacggaggaggggcggccaagcgcggaagaaaccccggcccgacgagaagaggcggccacaccacggcgcagagaa

SEQ ID NO: 242015 - RNA, 55 nt, Homo sapiens
ggagcccacagaagccagaaaaggaaggcaggagcagacaagggcccacaccaaa

SEQ ID NO: 242016 - RNA, 85 nt, Homo sapiens
cgaccgaagcgacccaggagagcacaggaccggagaagacaagcagcagcggagagcggcgaaaaagacgcacaaggaccggcac

SEQ ID NO: 242017 - RNA, 83 nt, Homo sapiens
ggcggccggcgcagcccgaccagccaagagccggcagcagacgaggaaagggagcagcaccggccacacccacagcacgaccg

SEQ ID NO: 242018 - RNA, 79 nt, Homo sapiens
cacaaagaagaaaacacaaaaacgggaaagaccccaagaagaagcggaagaggagccgcggaaccaagacacaaggaac

SEQ ID NO: 242019 - RNA, 78 nt, Homo sapiens
aggccgcgggggcaacggagaaaacccggaaccgcgacggcggcagaacccaggagaaacgagagggacagcaaggaa

SEQ ID NO: 242020 - RNA, 81 nt, Homo sapiens
ggcggaaagcgccagcaaaaaggcggacaggcgagaaccaggagccgagggacaagaacccaagaaacaggaaaaaaccca

SEQ ID NO: 242021 - RNA, 57 nt, Homo sapiens
agaggcagacaagacacccgcaggaggggaaagcaggaccgaccaagagcaccgggg

SEQ ID NO: 242022 - RNA, 70 nt, Homo sapiens
ccccggcgggcccgaggcggcgagagaggcaggcggagccgaccgggccagggaccaggaggagaagcaa

SEQ ID NO: 242023 - RNA, 77 nt, Homo sapiens
agagaacagcagcgccgcccgccgacagccaggcccgggagaagcccaagagaaacaggcacgccgcaccacccacc

SEQ ID NO: 242024 - RNA, 68 nt, Homo sapiens
cgggaggaagaacagcaagggccaacggaagccagagaaagcgagacgacgggaccgaaggaccccgc

SEQ ID NO: 242025 - RNA, 72 nt, Homo sapiens
cacccgaggcaacagagcgaagggaccaccaggccccccgggcagaagaaacaccaccagcgagcaccccag

SEQ ID NO: 242026 - RNA, 31 nt, Homo sapiens
ccggaaaggccacacaaccaacggaggcagg

SEQ ID NO: 242027 - RNA, 62 nt, Homo sapiens
aggaccaggccccaagcccgaggcccagaggaggagggccagcgacgaggagcggggccccc

SEQ ID NO: 242028 - RNA, 74 nt, Homo sapiens
aaaagaaggaacgaagaagagcccaacccaaccgcaggaggaagcagaacccaaagaagcgaagcagaaaggac

SEQ ID NO: 242029 - RNA, 79 nt, Homo sapiens
accagaaacaacagagcagacggaaaaacaaccaagaagaaagcacacgcacgagacccagaaagacacacagaaaaag

SEQ ID NO: 242030 - RNA, 58 nt, Homo sapiens
accaccgaaggaccggaagaggaccgacccccaaaccggaccaagagcagagacccac

SEQ ID NO: 242031 - RNA, 68 nt, Homo sapiens
cgccagccaggccaccccgggaacggagacaaccaaggcaccccgccaggaagaggcggcggcggagg

SEQ ID NO: 242032 - RNA, 83 nt, Homo sapiens
caaaaacaacccaaccacggggaaaaggcaaaaacccacaccgcaacccagcgagagaaagcgcgagcgagagcgagaagcgg

SEQ ID NO: 242033 - RNA, 77 nt, Homo sapiens
gggggggcaaacccgagagaacggaccaagacacccaggagaaagacagcggggaaaagaaaaaggagggggcaaaa

SEQ ID NO: 242034 - RNA, 69 nt, Homo sapiens
ggaacaaacaggcaaggagcgccacggaaggagagcgcagacgagcagaggaacaccgcgcacagccca

SEQ ID NO: 242035 - RNA, 81 nt, Homo sapiens
ccgcaccgcccgccgcccgccgcgcgccgccggccacccagaggagaaggccaccccgccggaggcacaggccagaggggc

SEQ ID NO: 242036 - RNA, 53 nt, Homo sapiens
ggcccaggcacgcccgcgcaccagcaccgggccaggagacgcaagagccaggc

SEQ ID NO: 242037 - RNA, 80 nt, Homo sapiens
cccgcgcccccgcgcgacgccagcaggcccccacgggaacgacgccgcgagagccagggagccaaagaccccccacaccg

SEQ ID NO: 242038 - RNA, 59 nt, Homo sapiens
gccggagacgcgcccgcgcgcaggggaagcgggcaggaaaccaagcacccaaaaggcca

SEQ ID NO: 242039 - RNA, 34 nt, Homo sapiens
gcaaaaccccgccgcacagccccaacggaaccac

SEQ ID NO: 242040 - RNA, 69 nt, Homo sapiens
gggggacgccggccaaacacgcccgggggaggcgagggcggagaacggaaaagcaccaggaagcagaga

SEQ ID NO: 242041 - RNA, 66 nt, Homo sapiens
acgccaaagccccccaaacgacacccccaagcagggacaggggcagagacgagcccggcgacgaga

SEQ ID NO: 242042 - RNA, 79 nt, Homo sapiens
gccccgagcagcgggaacaggcaggcagggccaacgggggcgacccgccaggaaccaaggcacgcgcgaagggcaggcg

SEQ ID NO: 242043 - RNA, 80 nt, Homo sapiens
gcgaggaggaaaggaggacgaggcccagaagccccacaccaacagcaggcagcacagaacagcgcgccccccgagccgcc

SEQ ID NO: 242044 - RNA, 68 nt, Homo sapiens
ggccgccgaggccaagacgcggcgcgcaacgcaagccccaaccgcgaggagagcgcagcaggcgcgca

SEQ ID NO: 242045 - RNA, 36 nt, Homo sapiens
caacacgaaccaggaaggcaggcccgccgaaaccca

SEQ ID NO: 242046 - RNA, 53 nt, Homo sapiens
ggaaggcgccccaacaaagggaacggggaagaagcaaacaagaacaggagacc

SEQ ID NO: 242047 - RNA, 73 nt, Homo sapiens
cacgagcaacagacgagcgcgccaggccgacagccgcggccgggcccgagcaaagaaagcaagggcgcagaac

SEQ ID NO: 242048 - RNA, 53 nt, Homo sapiens
cgagcgcgcacagagagcccccgagccccgcccaaggcaacgcaaccaccacc

SEQ ID NO: 242049 - RNA, 76 nt, Homo sapiens
cagccacccgagaggggaacaggggcacaggcgccacggaggagagcccacgaagggagagcaggacaggaggaca

SEQ ID NO: 242050 - RNA, 65 nt, Homo sapiens
caagccaacacagagcagccccaagaagagcaaaggagggagacgagcaaagaacgggacacgga

SEQ ID NO: 242051 - RNA, 88 nt, Homo sapiens
agcaagagcaggagccggagccccaccgcaaccaaggcgagaccacccagaaggaggggacccagaggccaaggagggggcagggagg

SEQ ID NO: 242052 - RNA, 84 nt, Homo sapiens
ccgaggcgcgggagccgcaccaccaacgcggccgacaacagccggcgccgccacgagaaccaggagcggcagaccgccgccagg

SEQ ID NO: 242053 - RNA, 78 nt, Homo sapiens
ccaccccgagccgacaagaaggacaaagagacaagccgagagaaagcaagcaaaggaccagcgaagcgcggcaaacag

SEQ ID NO: 242054 - RNA, 100 nt, Homo sapiens
cgacacgcggccgcggagaccaccgcggcgcggcagcgcgcccgagggcgcaagaggcagacagacaggcgacgggcagccaacaagaaacgacacccag

SEQ ID NO: 242055 - RNA, 89 nt, Homo sapiens
gccgggggcgcggccgcgcgccgccggcgaaggaggaggcggccggggcccaaaaaagggaaccgcacagcgagacaccccacacagag

SEQ ID NO: 242056 - RNA, 75 nt, Homo sapiens
cggcggggcccagggagaaaggcccaccggccgggagggcccagggcggggcccgaggggaggagccgggaacag

SEQ ID NO: 242057 - RNA, 71 nt, Homo sapiens
acccgcaggcccccacagaagacaagcgagcaagagccaagagaggacccgggacgaaccggcaaaccccc

SEQ ID NO: 242058 - RNA, 89 nt, Homo sapiens
ggaaccgaccagacgggaaaagaaacccggggacggcaaaacagaacagaaaggcggagaaaaaagagggggaaaagaccacgagaaga

SEQ ID NO: 242059 - RNA, 76 nt, Homo sapiens
ggcgacggagccggcgggcgccgcagccgcaggaagcgaagccgaagaagccgcgggggggcgcagcgccggcacc

SEQ ID NO: 242060 - RNA, 80 nt, Homo sapiens
gaacccccaaagagaaaaagaaagagcaagaacagaaggccagcaaaggagggaaaggcaccaaagagaagaaaggcaaa

SEQ ID NO: 242061 - RNA, 80 nt, Homo sapiens
cgggcaagcggggccgcaagcaggcaagacccaccccacggacccaccgcgcagccccgccacaagaagagggcagacag

SEQ ID NO: 242062 - RNA, 53 nt, Homo sapiens
agagccacaaaaaaggaagcgaaaacaaggaaaaaaccggcacacaccaccag

SEQ ID NO: 242063 - RNA, 51 nt, Homo sapiens
gcccggcgccggccgagaaggcagaggcggagaaagcacggaagcaaaaac

SEQ ID NO: 242064 - RNA, 73 nt, Homo sapiens
cgcccgcggccggaccgcaccggacagagcggacacacccagagcagggggccccgacccccacggacaggcc

SEQ ID NO: 242065 - RNA, 59 nt, Homo sapiens
gcagcggaaacgcagacacgaacgggccgaagcgcgcccacccgggcagaaaacgcaga

SEQ ID NO: 242066 - RNA, 78 nt, Homo sapiens
gaggaggaggaaaccaagaacggaaagcggcgccccggaggggagcaaggccacagggagaaccaaagaagagaaacc

SEQ ID NO: 242067 - RNA, 73 nt, Homo sapiens
cagagccgggcccgccgaggcccggagggagagaagacggagcagcacgccggaccaccagcaagcccacaga

SEQ ID NO: 242068 - RNA, 57 nt, Homo sapiens
gggccccgccaccggcacaccgaaggggacaaacagcaggggccaagaaagaaggag

SEQ ID NO: 242069 - RNA, 66 nt, Homo sapiens
aagaaggcacaagaaagcagcggcaagaacaggggcaggacaacccgaggagcgacagccaaaaac

SEQ ID NO: 242070 - RNA, 65 nt, Homo sapiens
gcccacgacagaacgaaaagaaaggaccccaggccccgcgagaccggcgcggcggcagacagccg

SEQ ID NO: 242071 - RNA, 70 nt, Homo sapiens
aagagcaaagaaagcgccccaaaagacaggcccaccgaaggaacacagagacacggcgacggaaggaagg

SEQ ID NO: 242072 - RNA, 82 nt, Homo sapiens
cagacagcggaacgggagcaagggaccaagaaaggcccagggaccaaagcccggacaaggcccgagcaccaggaccgcagaa

SEQ ID NO: 242073 - RNA, 72 nt, Homo sapiens
aagcacggaacccaaaggcagcggagggaagacaggcggcaccgaccagaacccagcagggggagcgaacaa

SEQ ID NO: 242074 - RNA, 57 nt, Homo sapiens
gcaaaaacaagacggggcgccccacagaggggcgacggggacaaaccgagacaaggg

SEQ ID NO: 242075 - RNA, 75 nt, Homo sapiens
caagaccagccgggcaacagggaacccccaccacaaaaaagccaggggaggcaagcaggggggcaaaggaaagaa

SEQ ID NO: 242076 - RNA, 59 nt, Homo sapiens
accgccggacccagcccagcgcacgccagacgagcaacccccagccacaacgcgaaccg

SEQ ID NO: 242077 - RNA, 83 nt, Homo sapiens
gaagcgagcaacaggagaacagacgaagcccccacagcggccagcagacaccccgaagggagacaaggcaccccaggagccaa

SEQ ID NO: 242078 - RNA, 73 nt, Homo sapiens
aaccagaggggccaacggacgacaggcggaggcgcagccgccgcaccagaccggcagcgggaaagccagcaaa

SEQ ID NO: 242079 - RNA, 81 nt, Homo sapiens
cacaggagaagcgccggagaggagccacaccacaaaggacggcagccgagcgcaggaggcagccagcaaaagacgagcacg

SEQ ID NO: 242080 - RNA, 36 nt, Homo sapiens
ccgccaacgcgcccccgaggcccacgacgaccaaga

SEQ ID NO: 242081 - RNA, 97 nt, Homo sapiens
cgcaccacccaaagcccccacggagccaaggaccgggagaggaccagggaaagcaaaccaaaggagggccgacaaccagagaaggaccagaagacac

SEQ ID NO: 242082 - RNA, 78 nt, Homo sapiens
gaagggcgcgcggccgcaagaggcagaccccagaacaccgaaaaggaaaccccaaagggagacggaaagaacaggcca

SEQ ID NO: 242083 - RNA, 63 nt, Homo sapiens
accacaaaaacgaaggcggcgggggacacgcgcccaccagggggagccagcagccgggagcgc

SEQ ID NO: 242084 - RNA, 59 nt, Homo sapiens
gaagagcgggaaaaccccgagaggacgaaggaccgaccagggcaaccaaaaagccacag

SEQ ID NO: 242085 - RNA, 60 nt, Homo sapiens
cagccaccaggcagcaaaaccacccaagccccccacgaccgaaagaggacagcgcccaag

SEQ ID NO: 242086 - RNA, 70 nt, Homo sapiens
gcaccaaggcggggaagggccaacccaacagcacagagggggcagcggcaagcaggggagccagccacac

SEQ ID NO: 242087 - RNA, 83 nt, Homo sapiens
ggagggggcgggcacccgaccggagcgggccaggcgcggaggggaacaccgcagcaggagacgcgccgaaaaagcaaagcaaa

SEQ ID NO: 242088 - RNA, 58 nt, Homo sapiens
gaggcaagcccacaccaccgcgaccaagccagcaacaggaggacgagaagcggaaaaa

SEQ ID NO: 242089 - RNA, 70 nt, Homo sapiens
gcgacacgacaggaacacagcccaaagcaagaggggaaggggaaaaaaccggccacagacccgaagacca

SEQ ID NO: 242090 - RNA, 84 nt, Homo sapiens
cgagggcgaagcacgacacagaaggggaggggagggaaaggcccaggaaaaagcaaagcccagccgaaaggcgacagccgggaa

SEQ ID NO: 242091 - RNA, 79 nt, Homo sapiens
gaggagcgagaacagaaggagacagcgaagcggggggaaggagcgaaagagagcggcaccgcagaaaggcaaaggcgga

SEQ ID NO: 242092 - RNA, 71 nt, Homo sapiens
aacagacagggccgcagggagaagcaggagaccccggcgccgaggcaagaggggagagggcggcgaacaga

SEQ ID NO: 242093 - RNA, 79 nt, Homo sapiens
gggggcaccgcccaagaaggacccaccacggaaggcacgcaaacaaccccacagccacacgccgagagaccaagaagag

SEQ ID NO: 242094 - RNA, 82 nt, Homo sapiens
agagccaaccagcaggcccggacagacaagggaggcgaggacggacaaaaggaaacggacgggaggccagccagcagaagga

SEQ ID NO: 242095 - RNA, 79 nt, Homo sapiens
gcgcgggcgggcagccccgggccaggccgcggccggggcaggagcgcagggacaagcgcacagcggagaaagcagcgcg

SEQ ID NO: 242096 - RNA, 77 nt, Homo sapiens
caccacgcagaacgcaacaccaaggcacaccaccccagccacgcccccgagagccgccaacacccggccgagggcac

SEQ ID NO: 242097 - RNA, 36 nt, Homo sapiens
agccaaacgccaaggcggcaagaggaaccagcaggc

SEQ ID NO: 242098 - RNA, 71 nt, Homo sapiens
ggaaggagcgcaaggacgccagcggcggacccagcgggccagaggcagaggcagcaggcagcacaacagac

SEQ ID NO: 242099 - RNA, 60 nt, Homo sapiens
ggaaacggaggaaaacaaagcgcagggcggagaagaaggcggcacgagcagccaaggaag

SEQ ID NO: 242100 - RNA, 75 nt, Homo sapiens
ccagcgggaaccaggagcaacgaccacggaccagcccagggagaccagcgaagccgggaaaaaaccccaaacaga

SEQ ID NO: 242101 - RNA, 75 nt, Homo sapiens
cggacagcagggcgccgcccaaggaacccgaaggcagcgggggcacagcgagggggcagaccccagcgccacgaa

SEQ ID NO: 242102 - RNA, 81 nt, Homo sapiens
gccaaaagaagaacaccaagccagcagggacggccacccacggaccgcacgcgggacacacacggcacggaggcagagggc

SEQ ID NO: 242103 - RNA, 80 nt, Homo sapiens
ggaacggcgaaggcccacgggagaaaaccgggcgcaagccgggacaggagcggaggagggcgcaaggaccgaccgcgcca

SEQ ID NO: 242104 - RNA, 41 nt, Homo sapiens
gcgaagcccagggaggccaccagaaggggcagaccaacacc

SEQ ID NO: 242105 - RNA, 71 nt, Homo sapiens
cggacgaccggagagccggggacgaagggaacccgccgggcggcccggcacccagccccccggcacccagc

SEQ ID NO: 242106 - RNA, 81 nt, Homo sapiens
ccgcccagacaccagcgcagggccaagggccccacccacaagcccgcggaggcccagcggaaacaggccgaaccccgagca

SEQ ID NO: 242107 - RNA, 78 nt, Homo sapiens
aaccgagcgcaagggaagaaaagaagacagccagggcaggagaaacccagcgggcccagagacgcagcgggaaaacca

SEQ ID NO: 242108 - RNA, 74 nt, Homo sapiens
cacaagcccgagcccgaagagagaaggcaaagaacccggggaaagacaagccgcggaaccagaggggacccggg

SEQ ID NO: 242109 - RNA, 70 nt, Homo sapiens
gagaaccgaggaacgaagaaacagacacaacagagcagaacccagccaggcgcaaaagggccaaaaacca

SEQ ID NO: 242110 - RNA, 77 nt, Homo sapiens
acgaggagaaagaccccagcccgggaggcgcgccccaccagacaccaaaccagacccacaggaccgcgaacaaggag

SEQ ID NO: 242111 - RNA, 42 nt, Homo sapiens
ccaaaggcgggaacaggggaggagagaaggccacgggacagg

SEQ ID NO: 242112 - RNA, 70 nt, Homo sapiens
cgaccggcacacaaggggagacagccggggaaggacagaaacaagaaacgcaaaacccgacacagagcag

SEQ ID NO: 242113 - RNA, 78 nt, Homo sapiens
agcagcagcagcaggaggggcagcaacaaggagggaaaaaagagcaggggaaaaggaaaggaaagccgcaaacagggc

SEQ ID NO: 242114 - RNA, 81 nt, Homo sapiens
gacaccggaagcgggaaaggcggaccggaagcgagcaggagcagagcggaagacccaccagaaagagcaaacaacaggaaa

SEQ ID NO: 242115 - RNA, 75 nt, Homo sapiens
cgcggcaaggcaagaagaacagccaaggagagcagagaacacccagaaaagccagaacggagagcgaccccaccc

SEQ ID NO: 242116 - RNA, 83 nt, Homo sapiens
ggcgagccgccaagaggcggcgcagccaccccgcgggaacgcccagcgcggaaccgaaggaaaagcacagaaaagagacccac

SEQ ID NO: 242117 - RNA, 58 nt, Homo sapiens
cggagcggcccagaccccgcccgcgggagcgggcagggagcgaagaacagagccgccc

SEQ ID NO: 242118 - RNA, 77 nt, Homo sapiens
cgggaccagagcggaacaggaagcgcaggcgcagcaacgccaaaaagaaaccgaagaagagaagaacacagaaaaag

SEQ ID NO: 242119 - RNA, 63 nt, Homo sapiens
cgcgccgccccgggcggccgcgggcggcgagggcggcacgccacaggacggcacccaccgcaa

SEQ ID NO: 242120 - RNA, 75 nt, Homo sapiens
gacagcacgagcagacagacaaaccaacggaggcaggaaacgacaaagcagaaggaaaaagaagaacacgaaaag

SEQ ID NO: 242121 - RNA, 71 nt, Homo sapiens
gcagcggcgcgggaggccggcgggaagcggcccggagaaacaagaaggaaagacgacgggaacagaggaac

SEQ ID NO: 242122 - RNA, 70 nt, Homo sapiens
ggcgaaggggaaacgaccgaaccaagaccgaacacaggccccaggcgggggaggaggaggggacgaggca

SEQ ID NO: 242123 - RNA, 61 nt, Homo sapiens
agcacccagacacaagcagagcaccagcagggagaaggcgcagacgggaaacgcgacaaaa

SEQ ID NO: 242124 - RNA, 92 nt, Homo sapiens
gagcgccggcgcgaggacagcgcggcccgcgaggagccgccgcgcgcccgcgcccccgcgcgacgccagagccagccgccgcgccaagaaac

SEQ ID NO: 242125 - RNA, 72 nt, Homo sapiens
gcacagaggaagaaagagacagcacgcccgaagagaccggcacggcacgcaccggcgccgcaagacgcccac

SEQ ID NO: 242126 - RNA, 78 nt, Homo sapiens
gcaggacccaggccagaccggagcagcggggacaggggaagaagagcgcaacaggaggaaaccaggggaagacgcaag

SEQ ID NO: 242127 - RNA, 74 nt, Homo sapiens
gaccgcagaagagccccgccagagaggcggaggacaccgccgcccagccacaggaccgacaccgaaaaaggcaa

SEQ ID NO: 242128 - RNA, 76 nt, Homo sapiens
gcaaaaggaggagaggaggacagacaaaaggaggcaagacacggaaccagaggcagcagcccaaccccgaggacag

SEQ ID NO: 242129 - RNA, 53 nt, Homo sapiens
gccgacccgccagaggaggccccccagccacggaaacgccgcaagacaacaga

SEQ ID NO: 242130 - RNA, 81 nt, Homo sapiens
cggaaccgacacggcagacaggggcagcaggggccagaacggacgggcccaccgaggaggggcgccgcgcacggccacccg

SEQ ID NO: 242131 - RNA, 76 nt, Homo sapiens
gcggcgcaggccgcaggggccaggcccaggagccgcggcacgagagggcgagagggacagaggggcacaagccaca

SEQ ID NO: 242132 - RNA, 79 nt, Homo sapiens
gaggacaccaaaggcgggagagcgccggggaggaagcccgcgagaacagggcggaggagcgggaagcagaaagaccgga

SEQ ID NO: 242133 - RNA, 80 nt, Homo sapiens
caaaggaacacagaagggaccagagcaaaacgggcaaaagcaggagagaggccaaggaaaaggaacagagagagcagaac

SEQ ID NO: 242134 - RNA, 72 nt, Homo sapiens
gaccgcccccccgaaccccgcagcgcagccgggaaccgcagagccagaaagaggcaaagacccgggaaccgg

SEQ ID NO: 242135 - RNA, 67 nt, Homo sapiens
gaggggcaacccggcaagacccacaggcaaaaagcagaccgacacgccacaccagagagaaccagga

SEQ ID NO: 242136 - RNA, 53 nt, Homo sapiens
agagagcgcacgaccgcgaaggggcgccgaaccgagcccgaagggaagggccg

SEQ ID NO: 242137 - RNA, 80 nt, Homo sapiens
aagaagggcacgcacaccgcgccagcagacccggaaacaagcccgacaccgaggaaaagcccggaaaagcagccaagcgg

SEQ ID NO: 242138 - RNA, 62 nt, Homo sapiens
cgacgcgggacgaagagccgaggagacaagaaggagaccggccaaaagacgaccaggagaca

SEQ ID NO: 242139 - RNA, 65 nt, Homo sapiens
aagagcgcacaggcccaacacccaacggccgagagcaccaccagccagcgggaggaagcgcacac

SEQ ID NO: 242140 - RNA, 65 nt, Homo sapiens
gcgacgcgcccggcccggagcccccagcgcagcggccgcgaccgagggaggccccggagagccgc

SEQ ID NO: 242141 - RNA, 79 nt, Homo sapiens
acagcaagacgccaggacccacggaagccagaaagggaacacgacagccaaaggagacacagaaggaagggagaagggg

SEQ ID NO: 242142 - RNA, 75 nt, Homo sapiens
caacaccggacaccgagaggaaccacaagcagacaacacagacaagaaaaaccaaaggacgcaaaaaagcacaga

SEQ ID NO: 242143 - RNA, 86 nt, Homo sapiens
ccacaacagggcggcaacaggggcgagaaaggagagagagacgacacccccaacggaaaagagagcccaaaggagacacggaaaga

SEQ ID NO: 242144 - RNA, 75 nt, Homo sapiens
caagaacccacagaaggacaaaggcaccaggcgggcaaacccagaagaaccaaggagagaagacgcagaagggaa

SEQ ID NO: 242145 - RNA, 38 nt, Homo sapiens
ccccaaggcagccacaaaaggaggagccgcgcgcccag

SEQ ID NO: 242146 - RNA, 81 nt, Homo sapiens
ggagcgcgaaggccgggacccggccccggcccacaggggggggcaaacccgagagaacgggggggcgaagacagcaagaac

SEQ ID NO: 242147 - RNA, 78 nt, Homo sapiens
ggagaagccccccggaccacccccaaaggcggcagacgcagacaaacaaaacaagaagccgaagaagaccggggaggc

SEQ ID NO: 242148 - RNA, 60 nt, Homo sapiens
ggaagaggaaagcaaaggagcagggaggcccccagggaagaaggggaggccgaaagccag

SEQ ID NO: 242149 - RNA, 73 nt, Homo sapiens
caagagcaaagaacaagaaaagccgaaggaacagaaaccaccaaaaaagccaaagggcacagaagccacccgc

SEQ ID NO: 242150 - RNA, 78 nt, Homo sapiens
cgcgagccaccgcgccggacgggagggccgaacacggcccaagggaagcaagaaaaaagacgggcccggggagagaag

SEQ ID NO: 242151 - RNA, 81 nt, Homo sapiens
gcggcaaaaggcggaccgcccccgccaacgaagaccgagaccagggggaagcggggaggacccccccagagcaacaacaga

SEQ ID NO: 242152 - RNA, 80 nt, Homo sapiens
ggaagcgcggagaccaggagcacaagaagaaccaggagcggcagaccgccgccaggaggaggcacgcagcccgagaagga

SEQ ID NO: 242153 - RNA, 46 nt, Homo sapiens
ccaccaagcaacacggaaccccgcaccacaagccaacaaaccgaaa

SEQ ID NO: 242154 - RNA, 77 nt, Homo sapiens
gaacggcccccccccagcccgccccaaaagggcggagaacggaaaagcaccaggaagcagagaggaccgcagaaggg

SEQ ID NO: 242155 - RNA, 84 nt, Homo sapiens
gcgcccagacccggaggaccgaagcccggacgacgaggaaccgcccaacaggcccggaggacccagagagggaccagggccaaa

SEQ ID NO: 242156 - RNA, 33 nt, Homo sapiens
agcacaccaccacaacagcacccccggcgagga

SEQ ID NO: 242157 - RNA, 76 nt, Homo sapiens
aggcaccggaaaccgcaacaaaaacagacccaaagaagggcgacacaacgcccccaggagagaagaggggcccgag

SEQ ID NO: 242158 - RNA, 81 nt, Homo sapiens
cggacggggagcgaacgggacagcccacacccggcgcggaggaacagccagcaaagacaagagcagaccagcagccgcagc

SEQ ID NO: 242159 - RNA, 70 nt, Homo sapiens
caccggggacgccaccggagaagggaggaaaaccaacaaggacagcgcccgcgccgaccccacggacggg

SEQ ID NO: 242160 - RNA, 76 nt, Homo sapiens
ggagggggcgcagaccgcagaaggacaccgcaggggcggagaacggaaaagcaccaggaagcagagaggaccgcag

SEQ ID NO: 242161 - RNA, 78 nt, Homo sapiens
ggggcacaccagacagacaggaacaggaccaagaccgaggaggcgaaggcaaagaaaaagccagccgaggacgggaac

SEQ ID NO: 242162 - RNA, 67 nt, Homo sapiens
aagacaaacaaccagcccaggggagaagcagaccgcaccaggcgggaccccgaaaaagcccaaacag

SEQ ID NO: 242163 - RNA, 59 nt, Homo sapiens
caacgaagcccggccacccccagccccgcccccacagagaccacaccgcgccagacccc

SEQ ID NO: 242164 - RNA, 80 nt, Homo sapiens
agcgcgaacgagcgacggcggaacccggggccgggacgcagcccggcggcagcagaaacaagacagacgaagaaggaaaa

SEQ ID NO: 242165 - RNA, 73 nt, Homo sapiens
aggacccccaaaaccacaaacgccacgcagaacagccaccaagacacaagacccacagggaaggggaacagcg

SEQ ID NO: 242166 - RNA, 78 nt, Homo sapiens
gagcagccagaaagcggcacgaacagagccgggagcaagaagaacacccagaggcagcagggagaccagaccaggaca

SEQ ID NO: 242167 - RNA, 77 nt, Homo sapiens
ggccagaaggggaaaggcggaccaagcaacggaccgaccgggcgaggggaggaggcgggcccacacgcagccacgca

SEQ ID NO: 242168 - RNA, 71 nt, Homo sapiens
agaaaaagaaagccccggcgggccaaaggagaaacaagaaggagacaacaacggccaccgggcgaagaagg

SEQ ID NO: 242169 - RNA, 55 nt, Homo sapiens
gcccaggaaggagccaaagcacaagaagaagacgagaaacaacgaacgagcaagg

SEQ ID NO: 242170 - RNA, 54 nt, Homo sapiens
gggagaaggcgcaacgcggcgccgggcaccggggcccacagaacaagcagccac

SEQ ID NO: 242171 - RNA, 98 nt, Homo sapiens
ggccgggccagcacccggccgagacggcggcagcagcggcacagacacacggcagggaaccccaccccggaaggcggggacacagacgagaacacgaa

SEQ ID NO: 242172 - RNA, 67 nt, Homo sapiens
aaggcggggcacgccaacgcaccaccacgccacaaaagaagacccaaagcaccaacaaaaagcaacg

SEQ ID NO: 242173 - RNA, 73 nt, Homo sapiens
ccgccccgaccacccaccccggacccagggcagccggcccaccccagggcaggagaacagcaaaaggccgcac

SEQ ID NO: 242174 - RNA, 64 nt, Homo sapiens
agcacgaagggcgacgaaaagcgggcgccaacaagaacagagaggaagacgcgaggaagaaaca

SEQ ID NO: 242175 - RNA, 57 nt, Homo sapiens
ccaaaccagacaccagcagagaccacagccacgacaagcaccgagacgacgggaccg

SEQ ID NO: 242176 - RNA, 78 nt, Homo sapiens
ccgcgcgagggcgcccagcggaaaagagcgacagcaggacgggaccgaaggaggaaccagggagccggggcgcgcacc

SEQ ID NO: 242177 - RNA, 75 nt, Homo sapiens
acaagcagccaagcccagacaagccccagggaagccacagcaccccagcacccagcaaaacaaacggagagagga

SEQ ID NO: 242178 - RNA, 79 nt, Homo sapiens
aagcacccaggccaccggaggagcagagggaaaagaacagacacgccagcggaggaggagcagagaaacagggcaccag

SEQ ID NO: 242179 - RNA, 65 nt, Homo sapiens
cgaaaaccgggaggcggggaagcccgacacgaccggcacccgaagagagggggcggggcagcgag

SEQ ID NO: 242180 - RNA, 50 nt, Homo sapiens
cccgagacggaggagagggccgacgggcgagacagagccacccaccggcg

SEQ ID NO: 242181 - RNA, 71 nt, Homo sapiens
aaaacaccaaaggaaagcagcgaacaccccagcggagaggccaaagccgcagaccgacagaagaacgagag

SEQ ID NO: 242182 - RNA, 80 nt, Homo sapiens
caagccggggcagcagcccaccccaaagcagaaccagacccaaaagagcaaacaaccgacggagaaggaaaaaagccgag

SEQ ID NO: 242183 - RNA, 50 nt, Homo sapiens
caaaaacaagagccccaaagcagccaaaaggacccccccccccacgcggc

SEQ ID NO: 242184 - RNA, 75 nt, Homo sapiens
ggaaccacacagggccgccaccaacagagaagacagagcaccaacgaggcgcagcacagagaaaccaaggaaagc

SEQ ID NO: 242185 - RNA, 72 nt, Homo sapiens
gagaaacacggccaggaaacgacacacaaagaaagaggagccggggacaccggcaacagacaacgagcaacc

SEQ ID NO: 242186 - RNA, 74 nt, Homo sapiens
cagaacaccgccccagcagcccacggccagacggaagcccgcgcagccgccagcgagggccacgcagccccagg

SEQ ID NO: 242187 - RNA, 75 nt, Homo sapiens
gaggacggcgagaaggcggcgcgcgaggcaagcgcgcgccgggaagaagacgccgaacaacagccggacaacacg

SEQ ID NO: 242188 - RNA, 71 nt, Homo sapiens
cagggaaaacaacaccgccaacagggggggaagaaggaagaccgcaggaaagcaggaaggcaagaaagcca

SEQ ID NO: 242189 - RNA, 72 nt, Homo sapiens
agaccacgcaggacagcgcgccccagcgcgcaaggcagcccgcaacgcaccagacagaagacgccaagccac

SEQ ID NO: 242190 - RNA, 77 nt, Homo sapiens
cgcacaggcagaagaagaaacaggcaaacgaggaccgccggaaacgaaacagcgcagccaggaacaggacgaagacc

SEQ ID NO: 242191 - RNA, 106 nt, Homo sapiens
ccgcgagcggagcggcaccggcgagccgggacgcgcggaacaaggaaacccaccgagagcccaaaaggcagagcgaggagagaagaaggagggaaagccaaacaac

SEQ ID NO: 242192 - RNA, 63 nt, Homo sapiens
agagaccaggacagaaaggccacggaagcagaacgcccgcaccggggacaaacgcggcgcgag

SEQ ID NO: 242193 - RNA, 79 nt, Homo sapiens
cgcaaccggggcacagccaccaaacaaccgcagcggaggcaagaggcaaaaagcagaagagggcagaagaccgaaggag

SEQ ID NO: 242194 - RNA, 76 nt, Homo sapiens
ccccgagcccagcaccgcgggaagacagaagcgaaggggacagggggagaaccgccagggaaacccgggggacaga

SEQ ID NO: 242195 - RNA, 80 nt, Homo sapiens
aagcacaaccacagcaagagcaccggcgaccgcaccacaagggacgagaccaaacggaagagacacgagacgacccgggc

SEQ ID NO: 242196 - RNA, 76 nt, Homo sapiens
ggaccccggcggcgcgcggaccagggggcggcgccaggacaggaggagagcaaacacacacggagaaagcgacggc

SEQ ID NO: 242197 - RNA, 80 nt, Homo sapiens
gacggcaccgcagcgggaagcgaaggacaagccacgaggaggcccagggagaaaaggaggccggacagagaaggcagagc

SEQ ID NO: 242198 - RNA, 84 nt, Homo sapiens
caagcaccgacggaaacaggcgaaaaacaacgacgaaggaagaaaagaggaggccaacacgccaccacccggggccaggaacgg

SEQ ID NO: 242199 - RNA, 73 nt, Homo sapiens
caccaaacacacgggaccgaaacaggccggggcacagcacagcgccggcgcaagaccagagccaaagaagcag

SEQ ID NO: 242200 - RNA, 76 nt, Homo sapiens
cccgggaggggccgccagcaccccagcgcggaagcgggaacacccaggcaggccgaagccggcagcaaggcgcggc

SEQ ID NO: 242201 - RNA, 80 nt, Homo sapiens
gggcacaggcccaaacaagaaacaccaagcagggcagacccccaaagaacaagcagcagcggcagggcaaagacagccgg

SEQ ID NO: 242202 - RNA, 92 nt, Homo sapiens
ggagccacaaggcagagcggcagagcggcaagcagagcggcaaggcaggccaggaccacagcggaacgggagaggcacggccaccaaccgga

SEQ ID NO: 242203 - RNA, 59 nt, Homo sapiens
cagacccaggaccccaggcacggacagggcgggggaacccagaaagccagacacacaga

SEQ ID NO: 242204 - RNA, 70 nt, Homo sapiens
cgcccagacggcgcgcacgggacgccggggagaagccaaacggaggaaaaggacgccgaaaagggagagc

SEQ ID NO: 242205 - RNA, 76 nt, Homo sapiens
caagcggcccgcgagcaaacgccgcggccccagggaaccaagaccaggacaaagaagacccggagagacaagccgg

SEQ ID NO: 242206 - RNA, 78 nt, Homo sapiens
gaccacaacaagggccggaccacccagaggcgagcggcgcagcgcaggagaggaagacgacagccggcgcacgcagga

SEQ ID NO: 242207 - RNA, 50 nt, Homo sapiens
accgacaagcagcccgcaggcagagagcagagaagccccaggagacgcca

SEQ ID NO: 242208 - RNA, 81 nt, Homo sapiens
agagacaggaggcagagccaaacacccaggcccaggaccgcagcccagccacacaaccgggcccccagagcgcggcagaaa

SEQ ID NO: 242209 - RNA, 82 nt, Homo sapiens
acagcggcccccggagggggcagcccgggagaaccgcggcggccggagcggcagaggaggaaaacgagagggcaacggcaac

SEQ ID NO: 242210 - RNA, 77 nt, Homo sapiens
ggcggcgcccagggcgccaccgccgccgcagaggcagagaggagggcaaaaagacaaacaccaccggagcacaaaca

SEQ ID NO: 242211 - RNA, 74 nt, Homo sapiens
ggagaacaagcacaaagcacaacaacgcagaaagcccacaaacggggcgggagcgcgcccacgagacaccgaac

SEQ ID NO: 242212 - RNA, 80 nt, Homo sapiens
ggcgccgccgcccccgggccgcggccgcagggagagggcgaaacggggcgggcacgcaggagcagcacggcgaaggacac

SEQ ID NO: 242213 - RNA, 91 nt, Homo sapiens
gaagccgaggggagcaaccagaaaagccaaggaagcacacaaagggcggagggccggaaaccaggagggaggggggccagacaagagccag

SEQ ID NO: 242214 - RNA, 50 nt, Homo sapiens
ggaacagaggcaagcacggacagaaaagggaagaagacaagagcagaaga

SEQ ID NO: 242215 - RNA, 40 nt, Homo sapiens
aaaccaaacggcaaccaagcagagagcgcagaagacagga

SEQ ID NO: 242216 - RNA, 70 nt, Homo sapiens
aaacccccacacagagaacccggagcaggaaaggacagggaagcaggagcgaccgcccaccgccacccag

SEQ ID NO: 242217 - RNA, 84 nt, Homo sapiens
gagagaggcccccgaggagagaccagcccgggagggaagaaggagcggaccaaagccgcagaggagccaccgcacccaggcgga

SEQ ID NO: 242218 - RNA, 81 nt, Homo sapiens
agggcacggaaagggaagaggcccagccagagaggcaagcgcgcccggaagcagggacccaaaaccagcaaagaacaagaa

SEQ ID NO: 242219 - RNA, 64 nt, Homo sapiens
gcaggcagacaaaagggccaaagaagggagagagccacggggaaaaagcgggaccgcagccagc

SEQ ID NO: 242220 - RNA, 40 nt, Homo sapiens
gcgcggacaagaaggagccaggcagacggagccgccggcc

SEQ ID NO: 242221 - RNA, 78 nt, Homo sapiens
acaccaaggagacgaccggcaaccgcgacccaaacacccaacgagacgggcaagggcgaagcagcaaaacacacagcc

SEQ ID NO: 242222 - RNA, 77 nt, Homo sapiens
cgccagacaaccggagccacgccccacgaccgccaggccccagccgggaaagaggccccaggcccccgaagggccag

SEQ ID NO: 242223 - RNA, 34 nt, Homo sapiens
aaagagggaaccaagggcggagaacggaaaagca

SEQ ID NO: 242224 - RNA, 63 nt, Homo sapiens
gccaacccagcaccacaagcaggcacgggaacaaagcagcgccagcaggggggaagccagaac

SEQ ID NO: 242225 - RNA, 76 nt, Homo sapiens
gcccaagagcacaggggaagaagcacagccacgagccaacacagacgccacaggcacacggacacccacggcccgc

SEQ ID NO: 242226 - RNA, 103 nt, Homo sapiens
cgcaggcaagcgcaacaggaggaaaacggccaacccaccgcgccgaaagaagaaagaagcagaccaaagagggaagaggccccacaacccacgccaagagaac

SEQ ID NO: 242227 - RNA, 71 nt, Homo sapiens
cgaaaagcgagaagagagaagcacacacgaagccagaaaaacggcgaagaggaaggggcgagccgccaaga

SEQ ID NO: 242228 - RNA, 48 nt, Homo sapiens
agcggaggccaacaaagacaggagagacaacggaggcaagaaagacgg

SEQ ID NO: 242229 - RNA, 90 nt, Homo sapiens
cgcagaggcagcagcagccgcggagcagagccgccggggagggagccagaagcaacgagaaccggggagaccacgacgcgccccgggcgc

SEQ ID NO: 242230 - RNA, 51 nt, Homo sapiens
agcgacaagaaggaccagagaaaaggcacagaacagggaaaagagaagaac

SEQ ID NO: 242231 - RNA, 58 nt, Homo sapiens
gaaggaccaagaaccagaggaggccgagaacgcggccacccggagggccagaccagac

SEQ ID NO: 242232 - RNA, 85 nt, Homo sapiens
aaacaggcacaaaccagcagggaggccagagaaaaagaaaagacaccgcacgaaaggccacccaggccgggagggacaccaaaag

SEQ ID NO: 242233 - RNA, 41 nt, Homo sapiens
gaggaaaagaagccagaccgagggcgcaggaggcccacagc

SEQ ID NO: 242234 - RNA, 62 nt, Homo sapiens
gaccaggccagcacgacaaaggaaccaaggcgggacacacggaagacacccggccacggccc

SEQ ID NO: 242235 - RNA, 76 nt, Homo sapiens
ccccgagccccgcaagagcaggaaagcggaaaaagcccgaacgaggaaaaacagccaagacggcaaagccccccag

SEQ ID NO: 242236 - RNA, 69 nt, Homo sapiens
aaacggaagaaacacccagcgccaggccagccaggagcccggaccgcaaaccacagaaaagcgaaaaac

SEQ ID NO: 242237 - RNA, 65 nt, Homo sapiens
ccgaggacggccggaaaaacgaacagacgcacaccacagcaaggaaaagagccacaccaagacag

SEQ ID NO: 242238 - RNA, 69 nt, Homo sapiens
agacacaacacaggggaagaccgggaggcaacgaggcaccagaaccaagaaaagggcacgacgaacaaa

SEQ ID NO: 242239 - RNA, 71 nt, Homo sapiens
caccaggcagaaggagacgacaaagggccacaaagcccagacaagcgcagaagcaacagaacccgaaccac

SEQ ID NO: 242240 - RNA, 84 nt, Homo sapiens
cgacaagccgcggcagccgcggaccaccgccgccaggcccccagaaacccacaaagccccgaggggcagggagcccagagggaa

SEQ ID NO: 242241 - RNA, 37 nt, Homo sapiens
cgcaaccaggaagaccagagacaacaaggagccacag

SEQ ID NO: 242242 - RNA, 71 nt, Homo sapiens
acagaccggagcgaaccaccccaaacaggcaacaaacgaggccgaaggaaggggagacaacgaggggcgcg

SEQ ID NO: 242243 - RNA, 74 nt, Homo sapiens
agacacgagaccggaaagaaaggagcgaccagcgcaaaggggcgaagccccggcggaggcagggcggaccggcc

SEQ ID NO: 242244 - RNA, 67 nt, Homo sapiens
cccaaggagcacaagagcgccccaagcaaggaagcgacaggcgcaaagccacaagccaggcgaaccc

SEQ ID NO: 242245 - RNA, 52 nt, Homo sapiens
gcggcagacggcaggccagcgcgaacgagaaagggagagacagcccagacgc

SEQ ID NO: 242246 - RNA, 57 nt, Homo sapiens
agcgagaggagaccgggaaaagaaaaaaccagaaggcaccgacaggaaaggaaaagg

SEQ ID NO: 242247 - RNA, 71 nt, Homo sapiens
gggagaagaacaagcagggccaaagggggggcacaaacagacgagggcggcgcggcggcccgcccccagga

SEQ ID NO: 242248 - RNA, 69 nt, Homo sapiens
ccgcaaggagaacagcagacacggacagcaaaggaaaccggaagaggaagcacaccacagccccgagac

SEQ ID NO: 242249 - RNA, 80 nt, Homo sapiens
ggaccacaggcccagacgagcggaggaggcacagggcgcggaccgcacgagcgcgaaaccccaccacgcggcaggggccg

SEQ ID NO: 242250 - RNA, 38 nt, Homo sapiens
gcccgccgccagcgggccgcagcgcaacaggagacgaa

SEQ ID NO: 242251 - RNA, 76 nt, Homo sapiens
cccccagagaggaccaaaagaaccagaagcggacggccaacggaaaccaccgcccaaagaaacgccaaaagaccca

SEQ ID NO: 242252 - RNA, 72 nt, Homo sapiens
ggacgcgccgcggagaagaagagcgcccgaaccgcacgagaccccaccacaccagcccaaccacccgccgcg

SEQ ID NO: 242253 - RNA, 91 nt, Homo sapiens
cacgcgacggaggcggcggacaggcgacagcgaccgcggcagccaaaacagagggagacgagaaaagggccgagcacaagccaagaaggcg

SEQ ID NO: 242254 - RNA, 75 nt, Homo sapiens
cagcgcagggggaaccagagaagagacaacagcccaagacacagcaagccagcgccggcccccagccccgggaac

SEQ ID NO: 242255 - RNA, 62 nt, Homo sapiens
cgccagcgggacgaggaccgagaccgcggccgggaccgaggaaacggcgaggaaagagagga

SEQ ID NO: 242256 - RNA, 75 nt, Homo sapiens
aggccgccggccgaaggcccgagcgcccgaggcgcgggaggggggaccggagcggccagaacgccaccaggaccc

SEQ ID NO: 242257 - RNA, 95 nt, Homo sapiens
ggccgagacaaaggcaccaggccaccacagaaacaaaagcaacaaagaggacaacgaagagaggaaagaagcggaaaggagggagcacacaacaa

SEQ ID NO: 242258 - RNA, 72 nt, Homo sapiens
cggcgggggggacaccggggcgcgggggacgggagcggcagccccggacaccgaggaaacgagacaacaggg

SEQ ID NO: 242259 - RNA, 84 nt, Homo sapiens
cgccaagagccgcagccaagcccggaagacgcgaccgggcaccggcgggaaaggggcggaaaaaccagccgggacccccagaag

SEQ ID NO: 242260 - RNA, 54 nt, Homo sapiens
aaagagcacccccacacccacacgaccagggaacagggcacaaccaaggagggc

SEQ ID NO: 242261 - RNA, 71 nt, Homo sapiens
caccaaccccagcggggaaaacaaaggcgagagccacagaaggaggaggggacagcagcaggagcccagca

SEQ ID NO: 242262 - RNA, 77 nt, Homo sapiens
caaagacgccaaggagaaggcagaccgggagcccaaggagaaccgggaaagacgggaagagagagacaacagggggg

SEQ ID NO: 242263 - RNA, 49 nt, Homo sapiens
ccaagcaacagcccagcaagggcacgaaccccagcccgccgggaagcgc

SEQ ID NO: 242264 - RNA, 81 nt, Homo sapiens
aacccccggccgcccacgagccacagagcagaacagaaacaaacagaggcaccgcccgaggccaagaagaagcaaccggag

SEQ ID NO: 242265 - RNA, 72 nt, Homo sapiens
caacgggggacggcccccaaacacgaagagacgacagaccagaccaagcaacagcgggcggagaaaacaagg

SEQ ID NO: 242266 - RNA, 131 nt, Homo sapiens
acggccacgacaggggcacagagggcccggcgcggacagagggacaccacaacgccgcccagaacaaagcaaaaaaaccaaccggggccagagaaggcacggccacccccaaagcaggaagcccagcaaag

SEQ ID NO: 242267 - RNA, 67 nt, Homo sapiens
gaggcacacaaggagacacgccaaccagcaaagcggcgaacacaacaagcaaggccccagcccaagc

SEQ ID NO: 242268 - RNA, 76 nt, Homo sapiens
aaagacgagccgcagacaagaaacacgagagagggagacaacagccacacaaagcagcaacaggagcagggaagaa

SEQ ID NO: 242269 - RNA, 78 nt, Homo sapiens
ggaccagagacacgccaagcagccagcccaggagagagaccgcagacacagcggaccagaccgaagaagaccaacacc

SEQ ID NO: 242270 - RNA, 77 nt, Homo sapiens
ccgggcaaccaaagacgggcgccacagacacaaaaggaccaagggaacggaagccccagcccgcgcgagccaggcgc

SEQ ID NO: 242271 - RNA, 44 nt, Homo sapiens
gacgccgagaagcagaggccccgaggaagaaccaagagccagac

SEQ ID NO: 242272 - RNA, 87 nt, Homo sapiens
aggcggccgagcccggcacagcgccgcgccgccgccgcggggcagcagcagccggcagcagcagcggcagaccagccagccccaagc

SEQ ID NO: 242273 - RNA, 68 nt, Homo sapiens
cgcgcgcacccccggacaggaagaagagcaccggcgacaaaggacagccaccccgacacccgacaaag

SEQ ID NO: 242274 - RNA, 80 nt, Homo sapiens
acccccggcccgcgcaaaggaacaacacaccaggcgagagcaggggagaagggaagggaaggcaccacggacagagccgg

SEQ ID NO: 242275 - RNA, 73 nt, Homo sapiens
ccaacgacgccacccaaaaacaacacaaggccgacgcgcacgaacacgggggcaaagacagggagagaggagc

SEQ ID NO: 242276 - RNA, 63 nt, Homo sapiens
ccaagggcagcaagaaagggaagggggggaaccgaagagcaaggaaaagaaaagggggaagga

SEQ ID NO: 242277 - RNA, 66 nt, Homo sapiens
cgggcggaggcgcaaaggcagcggggaaccggagccgcaaggggggagaagcgaccgaggccggcc

SEQ ID NO: 242278 - RNA, 42 nt, Homo sapiens
cacgcacgcgaagacagcggcagcaaccccaagggagacgga

SEQ ID NO: 242279 - RNA, 71 nt, Homo sapiens
aaacacccgcccaaagacgagcaaggagggaagaaaccaagagaaagcacagaccggaggcacagcaacca

SEQ ID NO: 242280 - RNA, 70 nt, Homo sapiens
ccacacggagcggaaaggcagcaccagacgccgccgaagacgaggcagcacggcaggagacgaggagagg

SEQ ID NO: 242281 - RNA, 70 nt, Homo sapiens
cgccaggcgaggggaccaccgcagaccacaaagaggagagagacgcccaaggacaagccgagaaaaccgg

SEQ ID NO: 242282 - RNA, 76 nt, Homo sapiens
ccaccaggacgccccagcgaagcagcagaaacccacgagcgaacaccggagccccgcagggcgggagaggaggcga

SEQ ID NO: 242283 - RNA, 77 nt, Homo sapiens
agccggacccagcgccggcccccaggcgaagaagcgcagccgcaccggccaaggggggggccgaagaagccaggggg

SEQ ID NO: 242284 - RNA, 69 nt, Homo sapiens
gagcggccgccggcccaaagggcgcgggcagaagggaccgagccacaacgcaacaggcaaacggccgcg

SEQ ID NO: 242285 - RNA, 51 nt, Homo sapiens
agaccgaaaacccaagggagcaccccagagggaagagccgcaggaggagaa

SEQ ID NO: 242286 - RNA, 79 nt, Homo sapiens
gaaaagcagacgaaagaaaaaaaaaaccggagaggaagagaagagggggccgggagcccagcagacgacgggaccccca

SEQ ID NO: 242287 - RNA, 92 nt, Homo sapiens
cgcagggccgcagcgggagcggacggcgagcgcgagcggcgcgagaaaaagcccaccagaggcgaggggaggaggaagcgagcgaaaagagg

SEQ ID NO: 242288 - RNA, 74 nt, Homo sapiens
gcaaagggcaggaaacaaacagggaaagcacaaagcgcggaaaggcaacacggagagaaccgggagcccgagac

SEQ ID NO: 242289 - RNA, 58 nt, Homo sapiens
ggacgccagagacaaaggcagccggccccagacgacgccgccgacagacggaagaaac

SEQ ID NO: 242290 - RNA, 73 nt, Homo sapiens
ggcaaggcggagaagaagcccgccccggagggcagcccaacgaaggccgcaaggacgaagagcaccggaaagg

SEQ ID NO: 242291 - RNA, 72 nt, Homo sapiens
agagaccgcaggaagaagcgaagagagagaggaaaacgagacagcccacccaccgccccgcagagaagacgg

SEQ ID NO: 242292 - RNA, 75 nt, Homo sapiens
gcaaccaagaggacacggcgcgagggcgccgacgcccggagaaccaccaggaaagaaagcgacgcggggaagggg

SEQ ID NO: 242293 - RNA, 66 nt, Homo sapiens
cgcccgaaccagggcagaagcagggagcgggaaacgcacaacagagaacagaaaagacccgcagac

SEQ ID NO: 242294 - RNA, 74 nt, Homo sapiens
agccaggcaaccccaccggccgacagccgcgacggcgagcccgggccgcgcccgagggcacagaacgaacagag

SEQ ID NO: 242295 - RNA, 80 nt, Homo sapiens
cgggcaacaggaagaccaaaaacacccgaaaacacaggaaacagaaggaaagcaggccccagcccgagccgacagcaagg

SEQ ID NO: 242296 - RNA, 74 nt, Homo sapiens
cgacgcaccgcaggcagacaaaagggccaaagaagggagagagggaaggcgccagacacagaaaagaaagagag

SEQ ID NO: 242297 - RNA, 79 nt, Homo sapiens
gcccccagcagcccaaggacccacccaggcccgccagccccgccggacaggaccaaaggagcaaaaagccaaggaaagg

SEQ ID NO: 242298 - RNA, 63 nt, Homo sapiens
cgcccgccccggcggggggcaggaccccacaggccgggcgcagggccacaccgaacccagcac

SEQ ID NO: 242299 - RNA, 73 nt, Homo sapiens
gaaggaccccgagagcggccgaccaacaaaaaaagaagggaagacgggaacacaagaacgaaaacaaacggaa

SEQ ID NO: 242300 - RNA, 76 nt, Homo sapiens
aaacggcaggaaaaaccagaacaaacagcggaaacagaagaaggagccgagaagaagaaggcccaggcgcacccag

SEQ ID NO: 242301 - RNA, 72 nt, Homo sapiens
ggaaccggggacaaaaggaaaacaaaaggcccaaagagacagccacggggagaaaacgcaggccacaaagac

SEQ ID NO: 242302 - RNA, 67 nt, Homo sapiens
cagaccagccccaggggaacagaaggacagaaaggacaccagccaccacgggacaccagcacagaaa

SEQ ID NO: 242303 - RNA, 70 nt, Homo sapiens
aaccggcaggaccgggcagaacaacgaacagaagcacaaccagagccggccccggggaggagcagagcca

SEQ ID NO: 242304 - RNA, 57 nt, Homo sapiens
ggcacagggaggccagccggagaagcgagcagcggaccgcgacgagaagagcaaaac

SEQ ID NO: 242305 - RNA, 61 nt, Homo sapiens
agcggagacgggagaagaaaagacaccccaagaagaagcggaagaggagccgcggaaccaa

SEQ ID NO: 242306 - RNA, 59 nt, Homo sapiens
gacgcaggcgcacggagacccgccggcaacgagcggccaccaaaagcagccgaccacca

SEQ ID NO: 242307 - RNA, 56 nt, Homo sapiens
caagcaggaccacccaccagccaccaggcagcagacgacaggacggcagagcccca

SEQ ID NO: 242308 - RNA, 71 nt, Homo sapiens
acacccacacaacgcggcgacacacccccggacaggggcacccccaggcaccggcaaacgggaaccacagc

SEQ ID NO: 242309 - RNA, 70 nt, Homo sapiens
gggaagcaaagcagccaacaccagaagaagggacaaaaggaagcccaccacacgccggcccggcgaaacg

SEQ ID NO: 242310 - RNA, 73 nt, Homo sapiens
gccgcgcgcgcgcgcgcgccgggccaggggacaccaagaacgaagcacccagaccagcaaaagagacaagaag

SEQ ID NO: 242311 - RNA, 83 nt, Homo sapiens
cgcgacaggggggccggccgcgcagccgaggcggggacggacagccaggaccgcgaggcgggcggccgccagggggcgacccc

SEQ ID NO: 242312 - RNA, 71 nt, Homo sapiens
ggaggggagcccgcgcccgccgcgggagagaggacccccccccccccccaagggacgccagaggggaagcc

SEQ ID NO: 242313 - RNA, 125 nt, Homo sapiens
cgggcggagacaggccaacacgcgggcagcgaacaagcgggagcaaggagggcgaagagcgaggaggacacggaaacggagaaaccaagggaaagaaacgaaggaaacagaaagaagaagagaaa

SEQ ID NO: 242314 - RNA, 53 nt, Homo sapiens
cgaagcagaaccccgagcagacaagaggaggagaacgagagagcaggaggcgc

SEQ ID NO: 242315 - RNA, 73 nt, Homo sapiens
gccccaaggcggcgcgggagcccggcgcggcaagggccccagcccccgcagggagggagagggacagaccagc

SEQ ID NO: 242316 - RNA, 78 nt, Homo sapiens
agggacagcccgccccccaaggaagcggcaaagccagaaagaggaggccagagcggaccagaaaagaaagggaaagag

SEQ ID NO: 242317 - RNA, 75 nt, Homo sapiens
gcgaggaccggcgggagagagagcgcccagaaagccagggcagcggggaagaagaaaaggaaccgaggccccccg

SEQ ID NO: 242318 - RNA, 108 nt, Homo sapiens
cggggcggaaaagcaaagggaaggccaaagaaacaagacaagggaagcccggaaggaaacaaccagcggaaagaagaagcaccaaagcaaagaagagaaaacgaccaa

SEQ ID NO: 242319 - RNA, 74 nt, Homo sapiens
ggccgcgacgcccgggacccagagcgggcagccgcaaagcacagaaaaggaaagaacacaccaggaacagacaa

SEQ ID NO: 242320 - RNA, 88 nt, Homo sapiens
caacccaccaccggcccaccagagaaaagaggccagccgcagccccccggggacgcccccaccagccaaaccgaggcagaaaagaaac

SEQ ID NO: 242321 - RNA, 57 nt, Homo sapiens
cacaaccgaacaaagacagccagaggaagggaccagcggagagacgggcagccaggc

SEQ ID NO: 242322 - RNA, 63 nt, Homo sapiens
aagagacggacgcacaggaaggaaaaaggggaccaaaagaacccagccaacccgcagagggag

SEQ ID NO: 242323 - RNA, 58 nt, Homo sapiens
cgggaggggaggcaaagggaggaggaggaccggagcaaaagaacagaagggagaagcc

SEQ ID NO: 242324 - RNA, 79 nt, Homo sapiens
gccgggacgcggagcccggagcggggcgacgaggcgagcgggggccgggcagagcgaccagaaagaaacacggcgcaaa

SEQ ID NO: 242325 - RNA, 72 nt, Homo sapiens
cgcagcagagggccagaccagacagaaggcaccacccgcaacgggagagaaaccgaggggcaaaacaggagc

SEQ ID NO: 242326 - RNA, 59 nt, Homo sapiens
cgggcgcacggcggagcagaaggaaccaaggcagccccaaccagacggaacaaaccaag

SEQ ID NO: 242327 - RNA, 87 nt, Homo sapiens
agagcgagaacagcagcagcagcaggaggggcagcaacaaggagggaaaaaagagcaggggaaaaggaaagggcaaaaaaagagcga

SEQ ID NO: 242328 - RNA, 99 nt, Homo sapiens
aacaacgggagaagaacgaaagaacaggcgcaaaaagaaaccacgacgagcgacacacagccgagagacaagcgaagaaacaaaaggagcccaaaaaaa

SEQ ID NO: 242329 - RNA, 83 nt, Homo sapiens
cggggcaagagcaggagcccggcaccccccgccgacaaggagggaaagaccacagcaagaccacgcccccagccgggggacca

SEQ ID NO: 242330 - RNA, 83 nt, Homo sapiens
gaggagagacgaccgagaggggagacaagaggagcgggaaacgcagcgacagcgaggaagagcccccacccgcccagccccca

SEQ ID NO: 242331 - RNA, 79 nt, Homo sapiens
cagcagaagagaacccaaagaagaaaaacacaccgacagcagaacacacgcgaaaggaaaccaagcggaagggaagcaa

SEQ ID NO: 242332 - RNA, 66 nt, Homo sapiens
cagagaaaaagggacggcagcggggagaagcagaccgcaccaggcgggaccccgaaaaagcccaaa

SEQ ID NO: 242333 - RNA, 77 nt, Homo sapiens
agcacgaagggacccagaaggagcaacggaggggagcgacagaaaagcagcacaacccccggagaaccgaagggaca

SEQ ID NO: 242334 - RNA, 66 nt, Homo sapiens
cgaccaaagcggccccagggcacacgggagagcagcacggcagcagggcggccaggacgagcccgg

SEQ ID NO: 242335 - RNA, 61 nt, Homo sapiens
cgcggcgcgcgaggcccgagggggaagagccaagaaaaaaaagagcaagggccggacaaaa

SEQ ID NO: 242336 - RNA, 63 nt, Homo sapiens
gccacaccccccgggcacaccacagggaaccacggagaccagaccgcgccacaggacaagaag

SEQ ID NO: 242337 - RNA, 74 nt, Homo sapiens
cagcacagcgcggggagaacggggagccgaaaaaagcagaagagaaagggacagaagcggaaagaaaaaagaag

SEQ ID NO: 242338 - RNA, 72 nt, Homo sapiens
ccgccaaaagccaccgagggagcgaaaaccgggccaggagcgcagaggacacaacggcacaggagaaaaccc

SEQ ID NO: 242339 - RNA, 65 nt, Homo sapiens
aggaggccaggagccggccagaaaaacggaaccgggagaaaacaagcgagagacagacacacggc

SEQ ID NO: 242340 - RNA, 71 nt, Homo sapiens
ggaaaacgggcgagcggcggccacaaaccagaggaggacggaccaaaccacagcaaaaacaccaggaaaga

SEQ ID NO: 242341 - RNA, 76 nt, Homo sapiens
ggggggagcagggaagacgccgcgccaccgagccggaccggagacggggccaacaggacccacaaagcaggaaggg

SEQ ID NO: 242342 - RNA, 80 nt, Homo sapiens
gccgcaccaggagcgaagagcgccgacaaggaggaggaagccaagaacgggagcgaagccacgcagcggcaccaacgacc

SEQ ID NO: 242343 - RNA, 68 nt, Homo sapiens
cacacagcgcccagcgggcacgagaaaaaagggcaggcagggaggagaaagagccaagaaaaagaaag

SEQ ID NO: 242344 - RNA, 108 nt, Homo sapiens
cggggaagagaaaaccagcgggcgagcacacggaacaaagccccaggaggcacagccgccagggcgcggcccaagaaggaccagacagaacaagggcccagccgcaac

SEQ ID NO: 242345 - RNA, 65 nt, Homo sapiens
ggcagcccccaaacccggcccagccacgagagaagaaagaaaaagaaaccgccagcccagagaca

SEQ ID NO: 242346 - RNA, 81 nt, Homo sapiens
ggagagggggagcgggagccccgaggccgaggagacaagacgggaaggaaaagaagcaacgccagcagagacacaaaccaa

SEQ ID NO: 242347 - RNA, 88 nt, Homo sapiens
ccgcgacacaccgcacccacacgggcgagaagcccacgaggcaacacgcaaggccgccaccaggacacaaggcacgaggacgaagagg

SEQ ID NO: 242348 - RNA, 73 nt, Homo sapiens
ggcagccgaaagaacgcaggaaggagaaacacagggccacgaaagaacgaacagcaaacacagcgacaaacag

SEQ ID NO: 242349 - RNA, 85 nt, Homo sapiens
ccgggccgcaggcagcccgcggcagcaggacacagacaaaaggagccacggagaaagaaaaaagaaagaagcccgaaccggaacc

SEQ ID NO: 242350 - RNA, 127 nt, Homo sapiens
aggcagccccggcaggaccagcacacacagcccgaaaggaggcggcgcagacagcacagcacagaaccccccgagcccgcagacacagaggcaggagaggagcgccggggagggcgggcccagggcc

SEQ ID NO: 242351 - RNA, 53 nt, Homo sapiens
acgaaaacccggcgccggaaaagacgagggaagaagaccgacaacaaccaggg

SEQ ID NO: 242352 - RNA, 64 nt, Homo sapiens
gaaggaccgcgagcagacccgacaacacacccggcagggcacagggaaggacccagaacagagc

SEQ ID NO: 242353 - RNA, 77 nt, Homo sapiens
gcagcccgccacccagagacacccccgaaaccacccccaggggagaggaaggagcggggacgggccccggggagggg

SEQ ID NO: 242354 - RNA, 80 nt, Homo sapiens
agacggcagcacgccggcccagaggccagaccaacaagcaacaagacagagcgggagccaccagcgccaaagggaagcca

SEQ ID NO: 242355 - RNA, 50 nt, Homo sapiens
agaaagaaggaggaagaggaacaacggaaccaaaaagcccgagggcaccc

SEQ ID NO: 242356 - RNA, 62 nt, Homo sapiens
aaggaagcaggcccaggcggcaacgagggccaaccgccgcagcagccaggcgaacacacaca

SEQ ID NO: 242357 - RNA, 75 nt, Homo sapiens
aaaccccccaccagcgccaagaggaagccaagaggggcaacaagacaccaggagcaggagaaagaagcagcgagc

SEQ ID NO: 242358 - RNA, 121 nt, Homo sapiens
ggaaggccccggccccagacgaggaccaggccgggaggaggacaacacccaacgaaccagagcaggccaagacagcagcacgagggacagcggagagaggggacaccaccagagccgcacc

SEQ ID NO: 242359 - RNA, 75 nt, Homo sapiens
aacaaacagggcacagggagacggaaaacgagaggaacaagccaagcagggccacccccaaccaggaccaaagac

SEQ ID NO: 242360 - RNA, 73 nt, Homo sapiens
aaacggaccaggaccaggaagaacagaggaggacgcaacaggagaaccgaaagcaggggagcagacaaggggc

SEQ ID NO: 242361 - RNA, 87 nt, Homo sapiens
ccagacgggggcgagcgagcaccgagcaacacacgcaggacccaaagacaggaccacgcaccagcagagaaggaaagcaaaccgaag

SEQ ID NO: 242362 - RNA, 44 nt, Homo sapiens
caaaccaaaagagcaacgcccgaaaccgagagagcccggaacga

SEQ ID NO: 242363 - RNA, 72 nt, Homo sapiens
gaaaacaggaaagaccgaccaggacacgagcgggaacgcaaacgaagaacggcgaggggacggggccgaaag

SEQ ID NO: 242364 - RNA, 82 nt, Homo sapiens
ccgagaccggaccgagagcggaccgagagcgcgaaacgcacgagaagagcaccaagcggaaaacgagacgaaggacaaggga

SEQ ID NO: 242365 - RNA, 61 nt, Homo sapiens
ggggcacagacaccagaaacaacagacagcgggcaccgagaagaaaccgcaagaaagaaag

SEQ ID NO: 242366 - RNA, 55 nt, Homo sapiens
gggggggaccgaccgcaacagaacggacccggacaaccaccaggaacggaacagg

SEQ ID NO: 242367 - RNA, 105 nt, Homo sapiens
gaaaaccgaccagggcaacaccaaaaacaaaacgaaccaggacggcaagcaaccaaggaaaagccgaaaggcacaaaacagaggcaagaaaaggaaagagaacag

SEQ ID NO: 242368 - RNA, 68 nt, Homo sapiens
gaaggaccaagaaccaggcaagggcaaaggaaaaacaggaagccccgcacgcggaggcaacagagccc

SEQ ID NO: 242369 - RNA, 85 nt, Homo sapiens
agaccggaccgagagcggaccgagagcgcgaaacgcacgagaaggaaaaccaacggcccggaggaccacagcccaggggccccag

SEQ ID NO: 242370 - RNA, 68 nt, Homo sapiens
ggaaccaggcgccccaggagaaggaccgaagggcccggaacccggcgccccaccagccagacccccaa

SEQ ID NO: 242371 - RNA, 74 nt, Homo sapiens
ggaaacgaacagcccgaagcgaaccaccaggccagagggcccaaagcggagaggcacgagcacagggacccaga

SEQ ID NO: 242372 - RNA, 51 nt, Homo sapiens
aaaaggccaagaaggcagaagccacgggcagaggcagggaggcaggggaac

SEQ ID NO: 242373 - RNA, 53 nt, Homo sapiens
ggcgccgaccccacaggaagggaagcacagcgacccgaagaagacggcacggg

SEQ ID NO: 242374 - RNA, 90 nt, Homo sapiens
cgcgggagcccgggcgcgcaccgccgcccccccagacaagaggacaccgcggaggaaggcgccagcagaaccggcggggagccgcagaac

SEQ ID NO: 242375 - RNA, 81 nt, Homo sapiens
caaaacagcgccggggaaacagaagcaggcacacagacacacccaaacaggaagagacagaacagacagaaaaaacaacaa

SEQ ID NO: 242376 - RNA, 86 nt, Homo sapiens
ccgcggggcgcgggccggccccgcggggagcgcccccggcgcgagccccaggaaagaacgcaggaagagagcaaagccaaaaacca

SEQ ID NO: 242377 - RNA, 61 nt, Homo sapiens
gaacaaagaaagcaaaagaaaaagaaaacagaaagcaacaaaggcaacggggaccccggag

SEQ ID NO: 242378 - RNA, 75 nt, Homo sapiens
agcgcggaaggaccaggcgccggcgccaccccagagagaggacgagaagaaggaggagacaggccgagaccgagg

SEQ ID NO: 242379 - RNA, 80 nt, Homo sapiens
gaaccgcaggcgcgaggagagaccagcaccagcccgccgccccggagccccgccacgccccaggcccgcaggggcggggc

SEQ ID NO: 242380 - RNA, 55 nt, Homo sapiens
ccccaccgagaacagcaccccgcagggaccgaaaagcccgccgggaccgagagac

SEQ ID NO: 242381 - RNA, 83 nt, Homo sapiens
cggccggagccgggccgggcagcagcagggcgccggcaggaggcaaagggaccccaagaaaccaaagggcaagagccgcagcc

SEQ ID NO: 242382 - RNA, 83 nt, Homo sapiens
gaaagggagccggagagcggcgggcgggaggcccggccagccgacgcaggcccaccggcggccaccgacaccagcaccagaca

SEQ ID NO: 242383 - RNA, 75 nt, Homo sapiens
gccgaagccagcaacacaaagacggcaacggggccgagcacagacagccgccaggccgggaacaccggaccggag

SEQ ID NO: 242384 - RNA, 84 nt, Homo sapiens
ccgccacgccagcacgccaacccggacggacaacaccggggagcgcgggggcaaggggagaaaccacagaaaggaaacaaagga

SEQ ID NO: 242385 - RNA, 57 nt, Homo sapiens
gggaccggcaaagaccagaacaccccagaagcaggagaccaccacaaacgaaacggc

SEQ ID NO: 242386 - RNA, 76 nt, Homo sapiens
cccagcagccaggaaggcaaaaaggaaacagcacggaaaccagaaccagagaaccccaaagacaaaagagcgaaaa

SEQ ID NO: 242387 - RNA, 76 nt, Homo sapiens
ggacgcgcgcgaggggcgacggggagaaggaaacccaaccgggcggagacagcagccaacgcacgcaagggggccg

SEQ ID NO: 242388 - RNA, 70 nt, Homo sapiens
agggaggaaaacaaccgagggcagagcgcaaaaaccagacaccccacaccaccacccagacgaccaaaag

SEQ ID NO: 242389 - RNA, 62 nt, Homo sapiens
cccaaaggagggaacagcccaaagagaagagaagcaaggaaagaagacaagaagaagccaaa

SEQ ID NO: 242390 - RNA, 72 nt, Homo sapiens
gacaaagagagcgaggaagcaaagaacagagaacgcgaccagcagcagaagagaaacaacgcagacgaggag

SEQ ID NO: 242391 - RNA, 85 nt, Homo sapiens
gcgcgagagcgggaagaggcggcagacagcgggaccgaggaagccgacaggaccgggggcacggaggggaagcacccagaacccc

SEQ ID NO: 242392 - RNA, 75 nt, Homo sapiens
ggggccccgcccggacgcggagagcccaagaaccaaccaagaacggccagagggcagaaaggacccaagacaccg

SEQ ID NO: 242393 - RNA, 51 nt, Homo sapiens
cggcccagggaccacggacgccacggagccagccaggacccgaaaagccag

SEQ ID NO: 242394 - RNA, 71 nt, Homo sapiens
ccagcagcccccagagcggaacacagggggacggaagcggcagcgggcagccggcccagcacagggagcag

SEQ ID NO: 242395 - RNA, 79 nt, Homo sapiens
ggacgagaccagaccaaccaacgaagaccaacgggagccgcaaggacaacagccgcggccagacagcggccggaggaga

SEQ ID NO: 242396 - RNA, 84 nt, Homo sapiens
ccccagggagcggagcgcccggccggcagcgggaaggaagccaaagcagaaccaagacaaacgaccccggaacacggaggcaag

SEQ ID NO: 242397 - RNA, 123 nt, Homo sapiens
gggacacagcagacgaggcgcaccagggagggacccgcaacccacaggccgaaagacagccccagcagagaccagagaagccccccaccagccccaacagcaacaacaggaccacccccaaac

SEQ ID NO: 242398 - RNA, 73 nt, Homo sapiens
gaacgcaccaaaacacagggacacaaagcgcgggaaagaaccccgcacccggaacaccagccagccagcagga

SEQ ID NO: 242399 - RNA, 77 nt, Homo sapiens
cgggaagcgcgcaccgccaagcagcaaagaaagggagacaggcagaaccagacccggagcagacgaggaggagggac

SEQ ID NO: 242400 - RNA, 85 nt, Homo sapiens
cccccgcagaccaaggacacccaagagggcgagcaggacgaagcgcccgccaccaaggaaaaagacaagggcagagcagccgggg

SEQ ID NO: 242401 - RNA, 71 nt, Homo sapiens
acacagaagaaagaacaaacaagggaacagcagagcggcgaccaccagaagacaagaacagaaaagccaga

SEQ ID NO: 242402 - RNA, 73 nt, Homo sapiens
acccgcaaggaaaaaaaagggaggaaagggcgaagagaaaacagcaaggaaccgagggacgcggagccccgga

SEQ ID NO: 242403 - RNA, 77 nt, Homo sapiens
gacgaccgcgcccagaagcgaagggagagcgccagagaagggcaccgcggaaccgagcagcaggagcggacggacgg

SEQ ID NO: 242404 - RNA, 108 nt, Homo sapiens
ccagccggcgggagaaggaggaggagcagcaggccccgggcccggcgccgccgcccgcaggccgcagccaagccggaacaggagcggcgagcccaaacgcaaggggga

SEQ ID NO: 242405 - RNA, 53 nt, Homo sapiens
ccagcccccaccacacacagcgcagacaccaaaggagccgacccgagccacgc

SEQ ID NO: 242406 - RNA, 72 nt, Homo sapiens
ggaaggaagcgaacgcaaccaaggagcaaagcaggggagcagcaagccgggaaacagcgcgcccagaaagcc

SEQ ID NO: 242407 - RNA, 81 nt, Homo sapiens
caccgccccggcagaagcggcagcaaagccaacggaccacaccaaaagccaccaaaggaacacgccaggaaaccagagaca

SEQ ID NO: 242408 - RNA, 80 nt, Homo sapiens
ggagaggagaagggaagcggcacaaaggacaaaggggaacgagaagccacacgcagccacaggaaccagccaggaaacca

SEQ ID NO: 242409 - RNA, 77 nt, Homo sapiens
cggagacagacacagaccaggccagacgggcgcagacacagaagacggcaacgaagaacgacaccgcagggaaaaag

SEQ ID NO: 242410 - RNA, 74 nt, Homo sapiens
ccaccagccaagcaaacaccccccccaccaccccaccagaaaggagccccaccaccggcaaacggagccacaaa

SEQ ID NO: 242411 - RNA, 82 nt, Homo sapiens
gccaccccggggaaagagcagcagagcaggacaccaggcagaaagagcccacaagacaaaaaagcagacggaaacaggcaga

SEQ ID NO: 242412 - RNA, 97 nt, Homo sapiens
cccccaggccgcgccgagcccgccgcgcgggcccgcccgacgcggaagcccaaacacagaacaggaaggaggcgcagccaaaagaaacacccaaagg

SEQ ID NO: 242413 - RNA, 68 nt, Homo sapiens
cgaaaacgaagacaccaagcgggacccaaagcgggaaccaaaggcacggagaaacgaggaaaacgaaa

SEQ ID NO: 242414 - RNA, 76 nt, Homo sapiens
ggcgacaccacgggaggcagaccacgagaagccaggaaaacgggccacaacacaacccccacaccagaggaccgcc

SEQ ID NO: 242415 - RNA, 75 nt, Homo sapiens
ccagagggaacgaagaagaggaaaaaaacacaacaaaaaagacaggcccagaggcggacacaaggagggcgggcc

SEQ ID NO: 242416 - RNA, 69 nt, Homo sapiens
gacgaagaccccaaacagacgcacaggccaacaccagcaaaagggaggcggaaagaaaagaaggaggcc

SEQ ID NO: 242417 - RNA, 74 nt, Homo sapiens
cccccgacagggacacagggagccccagacccacagccccagaccagcggcgccggagcaccggagcagaagac

SEQ ID NO: 242418 - RNA, 78 nt, Homo sapiens
caggaccgggccggaacgagacgcacggcaagccaaaaccccggaagaaagaaccgggaacaaagggccaaagaaaga

SEQ ID NO: 242419 - RNA, 60 nt, Homo sapiens
aaggaccaagaaccaggaccaggccaaccggagcgcacccacgccacaagccggacggcg

SEQ ID NO: 242420 - RNA, 76 nt, Homo sapiens
aagcagaccacccggacaccacggaccaaaaagacccgaccagcgcagacccaggggagcccaccagccagcaaca

SEQ ID NO: 242421 - RNA, 78 nt, Homo sapiens
ggcgacgggggggacgagcggagcccgggacaggaggacccagaaaccgaggaaggcgaaagagaaaggggcagaaga

SEQ ID NO: 242422 - RNA, 61 nt, Homo sapiens
agaccaagaaacgccaagccaaccccaaacagaggcggagaagagcagaccccacaaaacg

SEQ ID NO: 242423 - RNA, 83 nt, Homo sapiens
acggcaccacacccagcaaggaccccggccgggcaccaacgcaagagaacaacaagaccgagccgagagagcaccccaccccg

SEQ ID NO: 242424 - RNA, 78 nt, Homo sapiens
agaaaacggaagagccaacgaaggccaaaggacaggggaaacagagaaacccaggaaagagaccaagaagcaaggaga

SEQ ID NO: 242425 - RNA, 50 nt, Homo sapiens
cagacacgacggcagagccgggcgcggcgagcgcgccagacacaccgcgg

SEQ ID NO: 242426 - RNA, 62 nt, Homo sapiens
ggagagccccgccggagaggcgggcggcgccgggacaggcacccacccgcgagacccccaag

SEQ ID NO: 242427 - RNA, 53 nt, Homo sapiens
gcaacggaaacgaagaaggcccagcccaccagcgcgccccagaccaccggcag

SEQ ID NO: 242428 - RNA, 65 nt, Homo sapiens
cccacgggccaggccaccaccccccgggagaacaagagcgagaaggaacagaagcgcaagacccc

SEQ ID NO: 242429 - RNA, 90 nt, Homo sapiens
agcgaggggggcggcggcggagggagcggaccccaggacgccgcggaccaacccacagaggaccagagagaggacgggcgaagacaccaa

SEQ ID NO: 242430 - RNA, 71 nt, Homo sapiens
ggcaagaaaacgcgcaaacacaggacaaagagaaacaaaccgcaagggaggcaccacgagggcagggcagg

SEQ ID NO: 242431 - RNA, 59 nt, Homo sapiens
aaacagccaagcaccagaaggagagaaggggcaaaaaggccccgagcaccaggggggca

SEQ ID NO: 242432 - RNA, 86 nt, Homo sapiens
gcgccgggggaggccacagcggccgggaccaagcgagaagaagaagaggacaggcccaggaaagggaagaacaaaggaagagagca

SEQ ID NO: 242433 - RNA, 55 nt, Homo sapiens
cccagccagggcagggggagagcgcagcgcagccaaggacgacagagggggcaga

SEQ ID NO: 242434 - RNA, 60 nt, Homo sapiens
gggaacgagggggaagcggcccagggagggcgccacaggagccgcagaagcaaaggcacc

SEQ ID NO: 242435 - RNA, 63 nt, Homo sapiens
cagggcaggcagagccggcaaccgcaaaggcagaaccaccagccggacagggaccacacggcg

SEQ ID NO: 242436 - RNA, 71 nt, Homo sapiens
cagcagaccacggcccggagagagcacgcccaccgcgccggagccaaagaacaacaagccaccccccgcca

SEQ ID NO: 242437 - RNA, 79 nt, Homo sapiens
ggcccaccagggcgcacgggacccgcccaagagccccaaaaacaccagcccgcgcaacgggacgcaaagaagggggaga

SEQ ID NO: 242438 - RNA, 94 nt, Homo sapiens
cgaaagggggccgagagcggagcgcaggacagcgcaggagccccggcgcacgcggcgcgcacagacccagaggcgggccaggccagcgggccgg

SEQ ID NO: 242439 - RNA, 59 nt, Homo sapiens
ggcgagaacgaccccgagacgggaggccaacagacccaacccagaaggcaccaaacgga

SEQ ID NO: 242440 - RNA, 89 nt, Homo sapiens
cgggagaaggcacgagagaaacgaaaaaagcggaaaaccagagcaggcccggaagacccagagaagagcgccagccaggggagaccgcg

SEQ ID NO: 242441 - RNA, 89 nt, Homo sapiens
gggaccggggggcgaccaggagggccggggccgcgccggacccgaaaacaggggcacagacgacagaagccaagagggcgcaaagagga

SEQ ID NO: 242442 - RNA, 80 nt, Homo sapiens
aaaaggaccccggcgcggagaggaagccagccaccagccagggaagaaagagggccacggacagaggcgcagcagaggaa

SEQ ID NO: 242443 - RNA, 74 nt, Homo sapiens
cgcgcggaaggcagcgcccagcagcgcagcggagaccagaaggccaaaacaaaagagggcaggcgacagaagac

SEQ ID NO: 242444 - RNA, 71 nt, Homo sapiens
cgacgcggggcagccgagcacagcacggagccaacgcgaacaaggacacggagacgcccacccaagaaccc

SEQ ID NO: 242445 - RNA, 75 nt, Homo sapiens
gaaggaccaagaaccaggaggaccgcgccaacaggacgaggagaccgaccaggagaccccagcggagacgaccgc

SEQ ID NO: 242446 - RNA, 77 nt, Homo sapiens
ccccccagggcgcaagaacggcagagcgaaacaccaaaaccagcggagcgacacagccaagaaacagaacgacagcc

SEQ ID NO: 242447 - RNA, 61 nt, Homo sapiens
aacgcgcgacgacccagagaaccggagaaaaccagaaccacaaaggcggaggaagcagaac

SEQ ID NO: 242448 - RNA, 67 nt, Homo sapiens
gacacgaggagaaacagcagaaacgcaccaggccaaagaaagagaagaggaaagaaacagacagccc

SEQ ID NO: 242449 - RNA, 70 nt, Homo sapiens
ggagggaaacgcgagggcaccaggagaaacgcgacgcccgaggaagcggcgggcccgcggccagaacacc

SEQ ID NO: 242450 - RNA, 74 nt, Homo sapiens
cgccagcaccaagaaagccaaaggggccagagaacaagcccagacagcaagacgcgagcgcaggggaccaggca

SEQ ID NO: 242451 - RNA, 50 nt, Homo sapiens
ccaccacagaagcccccaacagccaaagacccaagaacggaacgaagagg

SEQ ID NO: 242452 - RNA, 78 nt, Homo sapiens
ggaaggggcggaaccggccgggccgaaggaggagaggcacagaaggagaggagccaagcccaacgggacgggaaaacg

SEQ ID NO: 242453 - RNA, 114 nt, Homo sapiens
gaaccgaacaaccaacaaccagaccccaaccaagccccaggaggggcgagccagagccaaggcaagaaagaggaaacagacgagggcaaccgagaagcaggggcaagccgagca

SEQ ID NO: 242454 - RNA, 72 nt, Homo sapiens
ggccagcgcccgaaaagagaagcaggccgggaacagccgacagaaagcggagaaaaagcccgagcgccccaa

SEQ ID NO: 242455 - RNA, 63 nt, Homo sapiens
gacaccggcggggcgcgggccgcacccgcgcgccggaaccaaaaagaagccccagagccgggg

SEQ ID NO: 242456 - RNA, 77 nt, Homo sapiens
gcccgcacaccccaggcccggagccagaagggcccaaccaagaccgaacccaagccagggaaacacgcacggcccag

SEQ ID NO: 242457 - RNA, 53 nt, Homo sapiens
acgacggggcgagaccccgcccggaccgcaggaaacacccaaggaaccaaagc

SEQ ID NO: 242458 - RNA, 57 nt, Homo sapiens
cgcaaggggagcggcgccaccagccgcaggacaagagcacgggaccccgacggagag

SEQ ID NO: 242459 - RNA, 77 nt, Homo sapiens
cagcgggccggacggggcggggggaacgggggagagagggagcaggccaccggaagagggcacaacgggaagagagg

SEQ ID NO: 242460 - RNA, 69 nt, Homo sapiens
ccacccaacgcgaagacggaacccgggacgacggggcgccagcacgagccccccccccacacccacagg

SEQ ID NO: 242461 - RNA, 74 nt, Homo sapiens
ggcaggacacacgcggcgcgggaagacggaccgcagagacaggggccaggccaggggcaggggaagcacccaac

SEQ ID NO: 242462 - RNA, 78 nt, Homo sapiens
aagcccggcccggcccgacaccgcgggccgccagacgggaaggaacgggccagcggggcgagcagagcgcgcgaaggg

SEQ ID NO: 242463 - RNA, 74 nt, Homo sapiens
gcgcgccaaggacacggcacaccgaccgacgggggacggcgcgaagaagagaagacaggaacggcaaagcaacc

SEQ ID NO: 242464 - RNA, 76 nt, Homo sapiens
caaagagacacagcccaaggacacccagccaacgggcggcagggaggaagagaggccagcgccagggagcggccag

SEQ ID NO: 242465 - RNA, 66 nt, Homo sapiens
ggcgcgcgcccgcgcgcgcggcggcgggggcagagggaagcggacccccggggcccgcgagcgggg

SEQ ID NO: 242466 - RNA, 77 nt, Homo sapiens
ggagggccagggcgagcaccgcaagccggcagagccgagaacagcgggcagcaaggaaaacagcccccggacccgca

SEQ ID NO: 242467 - RNA, 76 nt, Homo sapiens
ccagacaacagcagaaacgcggaaggccagagcaaagcgccaaggaaagagaaaaaccaacccagggaaaggagca

SEQ ID NO: 242468 - RNA, 76 nt, Homo sapiens
ccccgggaagaccaccaaaacggaaccccccgaagcgagggaagggcggacacaccggcccgagggcaggacagca

SEQ ID NO: 242469 - RNA, 75 nt, Homo sapiens
acgggagacaagcaagagccaggacaccccgaaagccggaaaacgggaaaagaaggacggcgccagagaaggaac

SEQ ID NO: 242470 - RNA, 80 nt, Homo sapiens
ccagggcccgaccgcagggagcagaggggacagaggcaccaaggaccccaagacagcaccgaggagcaacacccccaggg

SEQ ID NO: 242471 - RNA, 52 nt, Homo sapiens
aacccccacgcggccagcgaaaacgcccaggacagaacgaccgcccggccag

SEQ ID NO: 242472 - RNA, 72 nt, Homo sapiens
acagaggacaaggcagcaaagaagagcaaaagcgcacagccagaagaaaccgggaggaccgagaacagcgcc

SEQ ID NO: 242473 - RNA, 82 nt, Homo sapiens
gaacaaagagagagaagcggcgcgaccacaagcgagcaggaagcagcagcgcaggcccaggacggagccaggaccagcagcc

SEQ ID NO: 242474 - RNA, 39 nt, Homo sapiens
ggcgagagcggagcgggacccgcagggaaaggaaaagcc

SEQ ID NO: 242475 - RNA, 34 nt, Homo sapiens
agccgcagaacgccggcagccgcagaaagcaaca

SEQ ID NO: 242476 - RNA, 79 nt, Homo sapiens
ggccggccagcgccggaaaccaacaaagccggggccggacgagaaagccgaaggagacgacggaggagaccggcagagg

SEQ ID NO: 242477 - RNA, 80 nt, Homo sapiens
accgccaagcagccacgagaaagcgggacagcaagggaggcagcagacgggaagaagagagaaaacaaaagcgagacagg

SEQ ID NO: 242478 - RNA, 60 nt, Homo sapiens
cagaagcaaagagaggagaagaaaggaagggagggccgaacaggggggaacgacaaacaa

SEQ ID NO: 242479 - RNA, 79 nt, Homo sapiens
gcccgcggcccgaaccgagcggaccaagaagacgccggcaggccacagaggaagggggggccagcccaggagcacgcag

SEQ ID NO: 242480 - RNA, 82 nt, Homo sapiens
aaaaggcggaccggcgaacgaagaacccagcggggccgccccacccgaggcccaccccaacgagccagccaggcgcaggagc

SEQ ID NO: 242481 - RNA, 82 nt, Homo sapiens
aacgggccgcccccacagcaccccgggcggcggagcccacaccgcggacagagcaaacagcaacaaggagcggggggaccag

SEQ ID NO: 242482 - RNA, 71 nt, Homo sapiens
cggaggcagaggggaggcgcgaaaggcaaagagagggaagcagagagcccgagaccgcccccccagccccg

SEQ ID NO: 242483 - RNA, 69 nt, Homo sapiens
aagcggaaagaggaccagcagaaggagaagaggaagaaaacgcacaggcgggaaaaccgccacaaagcc

SEQ ID NO: 242484 - RNA, 71 nt, Homo sapiens
cgaggcgggcagcaccgcaccagagccagacacacgcggggggacgcgcaacacgggccacagcggcccag

SEQ ID NO: 242485 - RNA, 76 nt, Homo sapiens
aagaaaggcaaagaaaagaaggaaaggaaaaaagggccaggcacgggggaggggagccagacaacaaaaagaacaa

SEQ ID NO: 242486 - RNA, 65 nt, Homo sapiens
cggaaaacccagaaaacagcggaccagaaccgggccgacgccagggcgcacggccgccccgaccg

SEQ ID NO: 242487 - RNA, 70 nt, Homo sapiens
cgccggcgcgcccgcgcggcgcggggaccgcggcccgagcgacaaggaaggcgagcggcggcaaagggac

SEQ ID NO: 242488 - RNA, 74 nt, Homo sapiens
ccccggacccccaagggcccccacccaggcccggagcaaccgcacccccggagaccgccgcacggggggcaagc

SEQ ID NO: 242489 - RNA, 85 nt, Homo sapiens
aagccgagcagaggacaaaacaagagggccaggggacacggaaaacgacagaacgaagcagaagaacgcccaggcaggcagggaa

SEQ ID NO: 242490 - RNA, 83 nt, Homo sapiens
ggaaagaggaacccaagaaggagagcgccaagggaaaaaaagaagaagagaagagagaaaacaaaaaagggaaaaaagaaagg

SEQ ID NO: 242491 - RNA, 82 nt, Homo sapiens
accgaaaacaaccggaggcaacaacgagaagccccggccacaggcccaccaccaaccccaagcaccaaagcccagaagaggg

SEQ ID NO: 242492 - RNA, 60 nt, Homo sapiens
aggcacaggaacacgaggaaacccaccaccgacccccgaagagcagaagaaacagagcgc

SEQ ID NO: 242493 - RNA, 67 nt, Homo sapiens
cagaacaacgcagagcgggcaccaaccggccagaggaacagcagaggaaaaaaaagggcaggaggaa

SEQ ID NO: 242494 - RNA, 72 nt, Homo sapiens
gagcgccacgcgcggaaggcagcgcccagcagcgcagggaaacacaaagaagacaccagaagggccagcacc

SEQ ID NO: 242495 - RNA, 70 nt, Homo sapiens
cagcgcgccccaagcaggaagccagcacaacagacacccggccagaccagcccaaacgaccaccggccca

SEQ ID NO: 242496 - RNA, 36 nt, Homo sapiens
ccccaacggggcagagagaggaaggaagacccacaa

SEQ ID NO: 242497 - RNA, 78 nt, Homo sapiens
cagccagcacaccccgcgagcaaggcacgcagcacgggggcaggggccgacccagaacgccagcgccgcaaggaaaaa

SEQ ID NO: 242498 - RNA, 65 nt, Homo sapiens
gcgcaaaccacacaacaaacggcaccaacgaaaggcaaggaccgaaggacggaacaagcgagcgg

SEQ ID NO: 242499 - RNA, 70 nt, Homo sapiens
gagaggggagcggagacaaagccgccaggagccagcgggcgacaggcacggagaaagcgcagaaacagaa

SEQ ID NO: 242500 - RNA, 73 nt, Homo sapiens
cgaagaacaccgacacaagacaggcagcaggaccagaagaggggcccaggagggccagaacccagcaaaagca

SEQ ID NO: 242501 - RNA, 71 nt, Homo sapiens
gcccggcgagcacggcaggcggagggaaacacaaagaagacaccagaagggccagcaccacgacaacacgg

SEQ ID NO: 242502 - RNA, 68 nt, Homo sapiens
gaagagaccgacacaaggaaagcgaagcggggcccgggggaagccggaacccggaggaagccggaagg

SEQ ID NO: 242503 - RNA, 62 nt, Homo sapiens
cgaccaggccggccgcgccccccaggacccgccggcgcgagaaccaaaagaagacaagagca

SEQ ID NO: 242504 - RNA, 73 nt, Homo sapiens
aaagcagcggcgcagcccgggcccgaaaccgggccgaagacgcacacggagcagaggaaaggagacggggcaa

SEQ ID NO: 242505 - RNA, 82 nt, Homo sapiens
ccaagcaaccaccagcagcccccagagcggaacacaggaggaggcccggggaccagaagaggaggggcgaggaacaccggca

SEQ ID NO: 242506 - RNA, 90 nt, Homo sapiens
cagcaccaaacccacagaggcacgagggcaaaccggggaccgcagaagaagcggaggagcggaacgacgagcagcagaagaagcggcgga

SEQ ID NO: 242507 - RNA, 75 nt, Homo sapiens
cgcgaacggaaccgcaaaccaagaccgacacacaacagaagaaaacaggcgaaacaaggcacccccagcgccgaa

SEQ ID NO: 242508 - RNA, 75 nt, Homo sapiens
ggggggcagcagaaaaccacggacaggcgccggaagcacccaacagggaaagaagaaagcaccccgcaaaagaag

SEQ ID NO: 242509 - RNA, 77 nt, Homo sapiens
acccgcagccgcacccccggcggcagcacgaaagaccagaagccaaagcagaaccaagacaaacgaccccggaacac

SEQ ID NO: 242510 - RNA, 76 nt, Homo sapiens
cacaggacgggcggaaagcccaggcacgagaagagaagcccagagcaaaacaccccaaaccagaccaccgacgccg

SEQ ID NO: 242511 - RNA, 80 nt, Homo sapiens
ccagagcacagagaagagaaaaacacccacccccacagaggcaagcaccagcccgaagaagccgggcagaccaggcagca

SEQ ID NO: 242512 - RNA, 78 nt, Homo sapiens
cggcccccggaaccggcccggcggcaccgaaggaccagcaggggccgacggagcaagagcgaggaacagcggaacacg

SEQ ID NO: 242513 - RNA, 75 nt, Homo sapiens
gcccaccacgccagcagcgcgacggcagacagacaccacagaacagagcacacacggcgcagccagggcgcgggc

SEQ ID NO: 242514 - RNA, 78 nt, Homo sapiens
gggacccacccggcgacccagaacgcggacaaacaccgcggcaagaccaaagcgacacaacgagccccaacgcaggag

SEQ ID NO: 242515 - RNA, 74 nt, Homo sapiens
gcccgccgccgccgcccccccccccccacccccggcccgggagcccccgcccggagacagcaccagaagcgcgc

SEQ ID NO: 242516 - RNA, 82 nt, Homo sapiens
gcgaagcgagggcgaagcacgacacagaaggggaggggagggaaaggcccaggaaaaagacaggagacaaaccagcaggcag

SEQ ID NO: 242517 - RNA, 76 nt, Homo sapiens
cgggacccgcccgcgcggccagacacaaaccaagagggagaaaaggacagaaaagagagcaagaaggggacgacgg

SEQ ID NO: 242518 - RNA, 75 nt, Homo sapiens
gaccgaagaggcacgccgcacacacacaggggcccgggggcaggccccgagccccaaggggcgaacgccacaagc

SEQ ID NO: 242519 - RNA, 72 nt, Homo sapiens
accccgcagacgaagagcaaaagccaacacgcaccgcaggcacagccgcgacggccagggggccgccagagg

SEQ ID NO: 242520 - RNA, 70 nt, Homo sapiens
caacagcagagcgacagagaaaacccaaggcagcagaacggaggaggaacccgcacagacaagacagcaa

SEQ ID NO: 242521 - RNA, 74 nt, Homo sapiens
ccagaaggagagagagacagagggaaccggcagggcaagcggcgacacacgacggggaccgacagcaagaaaag

SEQ ID NO: 242522 - RNA, 87 nt, Homo sapiens
gcgcggccgagcggaggcggagcggcgccgagaacaggacccaaggccagccagccccaggcaccagcggacaggacagggaggacg

SEQ ID NO: 242523 - RNA, 79 nt, Homo sapiens
cgggaccgggggcaagggggccggaagcgccgcaacagaaacgccaccccggaaacaggaagaggagaaacaaggacca

SEQ ID NO: 242524 - RNA, 108 nt, Homo sapiens
cggagaaggaccggaggaagcccacgagagaagagcaaaggagacgcaccaccgcacaggggagcgaaggaggcccaggcgcggaggaggaaggacggccgggagaag

SEQ ID NO: 242525 - RNA, 74 nt, Homo sapiens
gagccccggcggcgcccgggcccacgcggaacgacggggcgaggaagcgcaacaggaaaggagagaagaaggca

SEQ ID NO: 242526 - RNA, 77 nt, Homo sapiens
gcaagaagacaaggagcagagacaggccaagggaacacggagaggaagaagacacggaccgacggacgggaaaccca

SEQ ID NO: 242527 - RNA, 56 nt, Homo sapiens
aaaggagcaacagacagcccccagaacagcaccaggaacgggcgcaccacgccacc

SEQ ID NO: 242528 - RNA, 78 nt, Homo sapiens
gcgaccaggagccggggcggcgcaggaggagccgaggcgagccaacagcacggcacaggggaagaagaaaggaaggca

SEQ ID NO: 242529 - RNA, 100 nt, Homo sapiens
ccacagagggcagagacaggaaaccccgcccccaacacagaccacaacgagacgacgggaccgaaggaccccgccagagacaaccgagcgccaggagaga

SEQ ID NO: 242530 - RNA, 56 nt, Homo sapiens
gagacaaccccaagaacaggcgaccccaaaagacccagaacaggaagcagaacggg

SEQ ID NO: 242531 - RNA, 74 nt, Homo sapiens
ccgagggaggaccccaacagccacacacagccggcccgcagaccggcggaaaaaagccgaggcggacagccaag

SEQ ID NO: 242532 - RNA, 80 nt, Homo sapiens
cacggggcagacacaacacgaggggcgccgcgggacgcagaggagagaagaacaggacaccaggccgagcacgaaccgac

SEQ ID NO: 242533 - RNA, 72 nt, Homo sapiens
cccgggaccccgccgccgcacaacccgagaggggaccacaaacaggcccaccggagcagcagcccgacccga

SEQ ID NO: 242534 - RNA, 71 nt, Homo sapiens
agaacaccgaaaaggaaaccccaaagggggggcaccgaaacacaggagcccagcaacagaaacgaagaaaa

SEQ ID NO: 242535 - RNA, 40 nt, Homo sapiens
gccaccgcaacccgcccccagggggacacaacccgcagac

SEQ ID NO: 242536 - RNA, 74 nt, Homo sapiens
cccgggcagccgcgggcgcaaagacgcaggaagacccaggggcagagcccggaggaaccaaaaaaaggaaaagc

SEQ ID NO: 242537 - RNA, 76 nt, Homo sapiens
ggacaggcacagacaaccagacccccgaagaacaggcgaaaaaggcccacaaccacggggagggggccagagcgcc

SEQ ID NO: 242538 - RNA, 55 nt, Homo sapiens
caggcaaacagacagaagagagggggcgaaacggagaaccccgacagaagccaaa

SEQ ID NO: 242539 - RNA, 74 nt, Homo sapiens
gggacggagggagaacacaggaaccgccccgagaggaaacacccccagaagagccaccacaaggacccaacacc

SEQ ID NO: 242540 - RNA, 82 nt, Homo sapiens
aagcccagccccaaacagccagaggaacgcacaccagcaccagcccaccaaaccagcacgaccccggagcagaagaaggagc

SEQ ID NO: 242541 - RNA, 61 nt, Homo sapiens
gaaaaacacagagagccgacggcagacacagacggaagggagggccacccacggcaggccc

SEQ ID NO: 242542 - RNA, 55 nt, Homo sapiens
cgcggaggccgacaggacgggcgccgccccgcgcggcaggggccagagggggcga

SEQ ID NO: 242543 - RNA, 68 nt, Homo sapiens
acgccagcgcccgaccgacgacaacacacgggacgcggccaacggaacacaaacaggcacagccagag

SEQ ID NO: 242544 - RNA, 85 nt, Homo sapiens
cgccgcgccccccccaccccggccgcgcccaagcgcaggggccccgggccagggagggcccgccgaaggacaaagaaaacgaagc

SEQ ID NO: 242545 - RNA, 78 nt, Homo sapiens
agggagggcccgggcagccaaggccacaagccccaagagcccaaagccgcacccgaccagaaagccacacacgaggag

SEQ ID NO: 242546 - RNA, 76 nt, Homo sapiens
aaaacacagagccacccggaaagagaggacggggacgggccccaggacgaggaagacaaggccagccacggaagga

SEQ ID NO: 242547 - RNA, 60 nt, Homo sapiens
cacaacgcagccaacacacagcccaaggccggcgcgggcaccacgcgaagaccagaaaag

SEQ ID NO: 242548 - RNA, 82 nt, Homo sapiens
gacgacgggccacagcagccggcggcggcagaggccacagagggccgccagcacaagaccggaggaagaagcgcgaggcgga

SEQ ID NO: 242549 - RNA, 78 nt, Homo sapiens
cacggcgcacgaagagaacagcaaagagaaacgcacaggaagaccaagggagcagcagaggcacacagcagcgcaccc

SEQ ID NO: 242550 - RNA, 61 nt, Homo sapiens
aggaacggcccggaaacaggaggacgagaagcgagccccgacccaacggaaccgaaccccc

SEQ ID NO: 242551 - RNA, 71 nt, Homo sapiens
agggacaacaaggaccacaaggagggaccagccagcaaagacagagagcagaagaaccaggacaagaacgc

SEQ ID NO: 242552 - RNA, 83 nt, Homo sapiens
aaacagagacccaggagaagaaaacagcagacaaagaagaggccaagcaaggccagagggaaaggccccccgggcaagccagc

SEQ ID NO: 242553 - RNA, 69 nt, Homo sapiens
ccggggggaagccccgcgccggccgcccggacagcgaaccagagaaagcccagagagagacaacgccca

SEQ ID NO: 242554 - RNA, 77 nt, Homo sapiens
ggagcgggcgggacaacccgcccacgacaggcaagcccaggggacaagacgaggaacgacaagaaaacgaagcagcg

SEQ ID NO: 242555 - RNA, 79 nt, Homo sapiens
caagagacgacacgcaagcaggcaaccgaaacaggacacgcgaagaggaagaaacgagaacggcaaaaggaagacgaca

SEQ ID NO: 242556 - RNA, 71 nt, Homo sapiens
ccacccgacagcaagcaccggagggagaagacaggcagggagcacgcgggcaggcagcccagcaaacccag

SEQ ID NO: 242557 - RNA, 57 nt, Homo sapiens
aagggaacggaaagacaggcaccagaaccacgcagcagaggcagcgacagagaaaac

SEQ ID NO: 242558 - RNA, 54 nt, Homo sapiens
gcgaggaagcaggcacgcaagaagaaggacggcaaacagaagggcgcaggaaaa

SEQ ID NO: 242559 - RNA, 73 nt, Homo sapiens
ggaaagccgacagagaagagagaccacaacacagaagaaacccacagaaagacagaccagaagagaggacaca

SEQ ID NO: 242560 - RNA, 59 nt, Homo sapiens
ccacgaagggaggaaaagggcagggacagcgcaggcagcagaggggacagcagaaagac

SEQ ID NO: 242561 - RNA, 77 nt, Homo sapiens
acggaagagcgcggccagcaccccaacgggccaaagaaccaagcgccccaggccacacgaagacccaggacccagcc

SEQ ID NO: 242562 - RNA, 71 nt, Homo sapiens
ccaccgcaggggcaccaaaacacacaccgaaacccacgggcaccacaagccgaacagccagccagcaaaag

SEQ ID NO: 242563 - RNA, 65 nt, Homo sapiens
gccagacagcagccaagaggaaggaacagagccacagagaaaaagacgccacaacagaagagcca

SEQ ID NO: 242564 - RNA, 82 nt, Homo sapiens
agcgcagccagggcagccaggcagagcgcacccgcgccccagccaaaggaaaaagaacagaggccaacccgacaagaggacc

SEQ ID NO: 242565 - RNA, 51 nt, Homo sapiens
gccagaagcgggcggcgcgggggagagggaccaggaggagaagcaaccaga

SEQ ID NO: 242566 - RNA, 82 nt, Homo sapiens
agaggagagggcagacggacaagagcgcggaacaggacgccccgagacccagcagccagcgaagccccaaggaagccgggac

SEQ ID NO: 242567 - RNA, 77 nt, Homo sapiens
ccacgagagcagccgcgaccgcgcacaggacaaggcaaggaggagaagacgaaagaggccaggaggagcgaggaggc

SEQ ID NO: 242568 - RNA, 72 nt, Homo sapiens
ggaggagcggacccggaagagggcgaggaggccggcgcggcacccacaaagcacgggagaccgcggcagccc

SEQ ID NO: 242569 - RNA, 79 nt, Homo sapiens
gggggcccgcccggggcggcaaggaccgagcagccccgccacccggaaacaacgaacgagcaaggaagggccaaggcag

SEQ ID NO: 242570 - RNA, 59 nt, Homo sapiens
cacccaggaaacagcgcaaggaacgcccacgaccagcaccaccgcaaccaggccaaacg

SEQ ID NO: 242571 - RNA, 70 nt, Homo sapiens
cagcaccgccgggcagacaacggggggggcaaggcgggaggcaggaggcagagaacaaggcaaagaggca

SEQ ID NO: 242572 - RNA, 78 nt, Homo sapiens
cacacaagacggaaacaaaaccggggaaagcgaaggcaggagaggagaaccaaggaagagccagacccaggagcccag

SEQ ID NO: 242573 - RNA, 75 nt, Homo sapiens
aacgcagccagagagcagacagaaccgcccacagaacaccggcacagcaacacgaagaagagacgaagaagggca

SEQ ID NO: 242574 - RNA, 78 nt, Homo sapiens
aaggacaaaaacagagcaaagagggcacaaaccagcaccgggagagaacccgaagagcccaagcagccaagaaaaagg

SEQ ID NO: 242575 - RNA, 71 nt, Homo sapiens
aaggaagcaaaagccccagaacacaggggaaaaacagaacgaaggacacaccaaaagaaacagcaaacacc

SEQ ID NO: 242576 - RNA, 79 nt, Homo sapiens
aggccacaaccaagagaaacaaccgcgagcccagacaccagaagcgaaggagaaggcggggagaacagccccgacacca

SEQ ID NO: 242577 - RNA, 57 nt, Homo sapiens
cgcgcgggagggccgccgcaacccagcagagagcagagagcccccacacaagaaccg

SEQ ID NO: 242578 - RNA, 78 nt, Homo sapiens
gccacagcgcgggccggccacaccaaccgaggcaaaagaaacaaacacgcacaccaaaagccgcagaaggcccgccaa

SEQ ID NO: 242579 - RNA, 61 nt, Homo sapiens
cccccgagggcgggaacaggagaaggccccaggcaaggcacgcacgaccgagaaagccagg

SEQ ID NO: 242580 - RNA, 41 nt, Homo sapiens
gcccaggaggagggcccgggacggagccaccgcgcccaggc

SEQ ID NO: 242581 - RNA, 75 nt, Homo sapiens
gagcaacgcaacaacaacgcgacaaaggagagaaacagccaaaacagcacaacagcgagagccaggaggagggag

SEQ ID NO: 242582 - RNA, 56 nt, Homo sapiens
cagagaggggaagaaaaacaaggcggaacaagccaccaagcacggccacacaacag

SEQ ID NO: 242583 - RNA, 81 nt, Homo sapiens
gcgggagagacagggccggcagggcagccgggggacagcgaggaagggacgccagaggggaagccgcacgagggagagacg

SEQ ID NO: 242584 - RNA, 71 nt, Homo sapiens
acagcagaaacaaagagccaaaaccagagacaagcaacacaccacagcagcgaagcagggggaggacaagc

SEQ ID NO: 242585 - RNA, 80 nt, Homo sapiens
aagggcagcggcggagccgccaaggcggcgcagcggaacaagcagaaagcacgaacaacgagaacaagacacgagcaaac

SEQ ID NO: 242586 - RNA, 84 nt, Homo sapiens
gccacacccacagagaacccagacaacaggacgccgccaagaagacaaaggaccagggaagaaccggggagaaacgaagaaggc

SEQ ID NO: 242587 - RNA, 58 nt, Homo sapiens
ccgggaggaccaggagcgccccaagagcccggcggcaggacccccgaagcgcgggaag

SEQ ID NO: 242588 - RNA, 73 nt, Homo sapiens
ggcagaccagcgccagcccacaggagagggcgcagggcaaaggacaagcaaagagccagcaaacaggcaaaac

SEQ ID NO: 242589 - RNA, 67 nt, Homo sapiens
gcgccgcaggcgcgcccggaccgacgcgcaccccggacaccccggccaaacagaggaaagagcggag

SEQ ID NO: 242590 - RNA, 75 nt, Homo sapiens
cgcgccgccgaccccccggcgccgcgccggcggcgcgcgggccaggcacgacaccgcaacgacacagcagcgaag

SEQ ID NO: 242591 - RNA, 72 nt, Homo sapiens
ggcgaacaagacgcaccggcacgaaggggaccagcccaagagggaggagacggacgggggggaccgggggag

SEQ ID NO: 242592 - RNA, 45 nt, Homo sapiens
cccgcacgagcagcgaacagcaaaccgcgcaagaaggccccagga

SEQ ID NO: 242593 - RNA, 34 nt, Homo sapiens
ggcggaagaagccggcaggcacgggagaacagca

SEQ ID NO: 242594 - RNA, 78 nt, Homo sapiens
aagaaaggggaaccccggagaaaaggccaagaaggcaggagccaaaaaccgaacacccggaaggggacaagggacggc

SEQ ID NO: 242595 - RNA, 74 nt, Homo sapiens
cgcaagagacgaggaaagaaagaaaccccaaaggagacggaggcgagaaagagaccaagacgaaaaagcgaacg

SEQ ID NO: 242596 - RNA, 77 nt, Homo sapiens
gcacggcagcggcaccacggcgacgcacaagcccgcgacacagggagaccagggaaaagacagcacagacccagaca

SEQ ID NO: 242597 - RNA, 90 nt, Homo sapiens
cggacagacgccgacgcccagggaagaacgaggggagaagccccccgacagcagcggaaggaaagcagaagcagaagaggaggagcacac

SEQ ID NO: 242598 - RNA, 81 nt, Homo sapiens
cccaccagaccacagggaccagccgagccaagggacaagcgaggacggaaggcaaacaaagacgagacaagacgaagcacc

SEQ ID NO: 242599 - RNA, 71 nt, Homo sapiens
gcggcagcccgagaccgcagcagccgagagaaccgggaaagaagacacaagaaaaggagccgaggagggag

SEQ ID NO: 242600 - RNA, 32 nt, Homo sapiens
ggaacgcgcaacacaaacggaagaacaacggc

SEQ ID NO: 242601 - RNA, 71 nt, Homo sapiens
gacgcggaagaggagaagcaagggagacacggaaccaagaaaacacaaggcacaaagcgaaagagcacgaa

SEQ ID NO: 242602 - RNA, 60 nt, Homo sapiens
acggcgcaaaaccagaggagggcggcgaaggggggacaagggcaagagcaacgagaggag

SEQ ID NO: 242603 - RNA, 85 nt, Homo sapiens
gcacgcgacccccaacgccaagcagcccaccgacaggcccggaggcagcagaagcggaacaggaaccaggagcgacgggaaacaa

SEQ ID NO: 242604 - RNA, 51 nt, Homo sapiens
gagagaggagagagaccagaggacgccgccggcaaaaaggcaaaaagagcg

SEQ ID NO: 242605 - RNA, 70 nt, Homo sapiens
aagccacagcaggacgcggccgaaccaaagagcccaaaaggcagccaagcgacgaggccgcaaagggaca

SEQ ID NO: 242606 - RNA, 81 nt, Homo sapiens
cgcgagcggccaggccggcgccggccggcgccccggggcccaaggcacacacgcagggcccgcgaggcagccacgcgaagg

SEQ ID NO: 242607 - RNA, 55 nt, Homo sapiens
ggacccgaaagacaaaaagacagaggcgggaagcagcacacaaccaaggggaaag

SEQ ID NO: 242608 - RNA, 81 nt, Homo sapiens
ggaagggcccaagggccccccgggaacgcagcgcgcaggaccacggggaaagccaagaaccgggccagaggggaggacagg

SEQ ID NO: 242609 - RNA, 74 nt, Homo sapiens
cccaccagacgaggccaccagccagggaacggccaggcgcagcgccacgggagccggggcagacggccgaaacc

SEQ ID NO: 242610 - RNA, 82 nt, Homo sapiens
gcgggaggcggcaaaacagcaaccccgcgcccgccacggcccgccgcccggaaggccaccgcgcggcggagcaggagcaaag

SEQ ID NO: 242611 - RNA, 69 nt, Homo sapiens
ggcccggccacccgggagagccgcggcgcaagcaccgacgagaggcggggaaaaaaaggggaccaccgg

SEQ ID NO: 242612 - RNA, 53 nt, Homo sapiens
caaagacccggcaccaacaggcagaggggcgggcaaaggagaggcacaggaag

SEQ ID NO: 242613 - RNA, 113 nt, Homo sapiens
ccacaagagaacaacacagaaccagccagcgaagcagagcagaggagcccagcgagagcaggaaggggaggagcacagaacgccaggaccaaaacagggagaaacacagccag

SEQ ID NO: 242614 - RNA, 81 nt, Homo sapiens
cgccagcacaggaaggagaccacgagccgaggacaaccaacaaaggccaacggcacagaagacaggacggaggcaaaaaac

SEQ ID NO: 242615 - RNA, 73 nt, Homo sapiens
gaacagaaagccccagaggaaaggcaaaagggagacagaaagaggagaccagagaacaggaacaacccagaca

SEQ ID NO: 242616 - RNA, 81 nt, Homo sapiens
cggcaaggagagacgcgcgaggggcgccgaagcgaggggagacgcaccccgaagagggaccccccgagaagcggaccccgg

SEQ ID NO: 242617 - RNA, 82 nt, Homo sapiens
ggcgcccggcgaaggagccgcggcggggggaaaaggagccccaccaaggagccaagggacggaccgcaaggacccagacccg

SEQ ID NO: 242618 - RNA, 61 nt, Homo sapiens
cagcggcggcggcgcccgcgggggaaaaaggcggacgaagaggaggcaccgccggccagga

SEQ ID NO: 242619 - RNA, 57 nt, Homo sapiens
ggggagggaaagaaagggagaagcccgacagagaaaggagaaaaggccgacggagag

SEQ ID NO: 242620 - RNA, 69 nt, Homo sapiens
acccaggaagcagccagaccaagaacaaccgcggacacggagaggaagggcagaaaacagaccgcaaaa

SEQ ID NO: 242621 - RNA, 83 nt, Homo sapiens
ccgcggcccgggccgcaccagagcgcccggcccacgacacaggaagaagacagggaccaagccaccccagaagagcgcaccga

SEQ ID NO: 242622 - RNA, 58 nt, Homo sapiens
caacagacagcccagcgcaggaaagcagggagggccgggggccgagacagcgggccca

SEQ ID NO: 242623 - RNA, 68 nt, Homo sapiens
aaagagagaaagcaggagaggcaaccggaaagaacgcaagagcagaccgcaacccaccaaggagcaca

SEQ ID NO: 242624 - RNA, 79 nt, Homo sapiens
gcaccgcggagcaaaaaaagagcccgcaagaagaacagagacagcagccaaacccccagggggaagcagaccaagaaga

SEQ ID NO: 242625 - RNA, 86 nt, Homo sapiens
acgaccggcccggcagcgcgccacagcccgcgaagccaacgaggcgggaccgccagaaagaagaggggagagcaggaccagcacca

SEQ ID NO: 242626 - RNA, 71 nt, Homo sapiens
cggacggacacagacaccaagggaggccacagagacaagagagaggagccccggcccccagccgccagaac

SEQ ID NO: 242627 - RNA, 37 nt, Homo sapiens
cggcgcgggacgcgaggccggaacccggccggaaacg

SEQ ID NO: 242628 - RNA, 66 nt, Homo sapiens
cagcccggcccgggagcacgcggcggagaaaacggaagcgggcccgacacagcgaccagccagccc

SEQ ID NO: 242629 - RNA, 76 nt, Homo sapiens
acaaacccagacgggcaagcgagcccggggagagggggcccgcgcagacgcaccgagaaaacgccggacgggccaa

SEQ ID NO: 242630 - RNA, 84 nt, Homo sapiens
acgccaccgccccggcccgcccgcccagagccgaggcggcggcacgagggccccgacccagaccacaaagccgcccacaccgga

SEQ ID NO: 242631 - RNA, 101 nt, Homo sapiens
gaaggaggggacgcagcgcggacacgcagcgagaccagacgcccagcacaccaccgcgggagacacacgcaccaccgccagaggaccacccgcacccaggg

SEQ ID NO: 242632 - RNA, 46 nt, Homo sapiens
ggcagagccccacaggcacccgaaaagaccagcaacaggacagcag

SEQ ID NO: 242633 - RNA, 64 nt, Homo sapiens
gcacaaagacgccggaccacccagccccgcagcggacagaaacaggcagccaggcggacacaga

SEQ ID NO: 242634 - RNA, 77 nt, Homo sapiens
aaggagacaagacaaaaacaccccagaaacagaggaaaagaagcccagccagagaggaaacgcggaaaaacaaggaa

SEQ ID NO: 242635 - RNA, 65 nt, Homo sapiens
ccccagaagcagcagacggcacacgcagcagaagcccggaaacagcaagacggaacgcaaacgcc

SEQ ID NO: 242636 - RNA, 69 nt, Homo sapiens
ggagcgacaagggaagagaaaggggcaacaagaaagaaaaccgggacgggcgaaagagaagaaagaaac

SEQ ID NO: 242637 - RNA, 44 nt, Homo sapiens
gcggcgcccggcccccgccgcgggcagcccacggaagggccaag

SEQ ID NO: 242638 - RNA, 119 nt, Homo sapiens
gggcagacgagcccgaggaccggacacggaggacgagggcccacagccgaggaggagcgggcgaggaggacggggagagcggggcacgccccccgccagcggcccaggccgccccaagg

SEQ ID NO: 242639 - RNA, 83 nt, Homo sapiens
gggcgcgcgggaacaccggagcccgcgggcagcagaagacagcggagaacccacgaacagcacccagggagaagaccagaaac

SEQ ID NO: 242640 - RNA, 54 nt, Homo sapiens
agggccaaagaagggagagagggaagaaggagacaaccagcggacaaggggaag

SEQ ID NO: 242641 - RNA, 74 nt, Homo sapiens
cagaaagcgcgaacaaggcgggggagggcagcacagcggccagacaagcgccccgacgagagacaagagggggg

SEQ ID NO: 242642 - RNA, 76 nt, Homo sapiens
ggcggaccgacggagacggaaagccgggacaggaggacgaaggacagagagggacgggcagacgccccgacacgca

SEQ ID NO: 242643 - RNA, 52 nt, Homo sapiens
aacgcagccaacaaacaacgccaaccaggggggacgccacgcgcacacgcag

SEQ ID NO: 242644 - RNA, 80 nt, Homo sapiens
agagggcggcccagggggccacgcgcccacaccccagaccacgccgccaggaggcaacacgggcccccccgggagccgcc

SEQ ID NO: 242645 - RNA, 56 nt, Homo sapiens
ccagaccgccgaccggcgcccgccggcccgcaagaggggacaccacgcgccccgga

SEQ ID NO: 242646 - RNA, 70 nt, Homo sapiens
gcagagaaagaggcaaaggcacacaacaagcgcagggaagacccaagagcaaagagaggacaagcgcaag

SEQ ID NO: 242647 - RNA, 70 nt, Homo sapiens
ccggacagaagcgcggcggcgcggcgaacgaggaaccccagagaggacagaagccaaccaggcagcagag

SEQ ID NO: 242648 - RNA, 58 nt, Homo sapiens
gcacaaaagccagcccgaggagcaaggggcagagcgcagcggaacagcaagccgggcg

SEQ ID NO: 242649 - RNA, 65 nt, Homo sapiens
aaaaggagagagaggcgcgaaggagacggaccagcggaaacagaggcaagccgggaacgcaaaag

SEQ ID NO: 242650 - RNA, 75 nt, Homo sapiens
accaagccgggagcgaagaaggggaaagaccgccgcaaggcaaccggccccgcaaagccaaccgcaaccgccagg

SEQ ID NO: 242651 - RNA, 57 nt, Homo sapiens
gggacaggaaccaaccgaaaggccaaggaaaaggaacagagagagcagaaccgaaac

SEQ ID NO: 242652 - RNA, 82 nt, Homo sapiens
ccgcccgcagcgacacaccaagcggaggggacgccacgcaacgccgggcgccggccgagcccgggaaaacgacagcagcagc

SEQ ID NO: 242653 - RNA, 73 nt, Homo sapiens
ggagcccaaacggagaagcacacggcgacaaaacagccaaggggagccagaaggaccagcagggccggcaaca

SEQ ID NO: 242654 - RNA, 79 nt, Homo sapiens
ggaggaggcggcaaaaaagcaaacacgaggccacggggaaacacagcagaacacagggaggaacaggagcaccacgaga

SEQ ID NO: 242655 - RNA, 56 nt, Homo sapiens
cgccgcggccgagcagcggggcaaggccagagaaggcgggagaaagacacgaacca

SEQ ID NO: 242656 - RNA, 70 nt, Homo sapiens
gccccagagaccaggacgaggcccaaagagagcaacacggaggagcacgcccggaaaccgaacacgaggc

SEQ ID NO: 242657 - RNA, 87 nt, Homo sapiens
ggcgaggcccggccaacgggcgcgcagagccgcggcgccggagaagcgcagcacacgcggaagccacaaccagaggaccagacagag

SEQ ID NO: 242658 - RNA, 83 nt, Homo sapiens
gacgccaaccacgaagcaagaagagaagcggaagcagcccggaagaaagaggcacccacagaaggagaacaagcagagcaccg

SEQ ID NO: 242659 - RNA, 72 nt, Homo sapiens
gagcagcgcgcaagggcgcgcgggggcacagcccaggcgcagcagcggacccccccggccccggaggcacag

SEQ ID NO: 242660 - RNA, 62 nt, Homo sapiens
ccgaaccggccgaagaggccgcaggggagagcagggaagcccggggcggcgacggagcacga

SEQ ID NO: 242661 - RNA, 77 nt, Homo sapiens
aagccaccagagcggcccccagcaccacagcccgcagccccgccagccacccccagggcacacacgaaacgggcaac

SEQ ID NO: 242662 - RNA, 85 nt, Homo sapiens
aggacggagcgcgcggggccggaggcgggcgaggaagagaggacgagacgcagggcacgggccaccaggggaacaggacaaacga

SEQ ID NO: 242663 - RNA, 70 nt, Homo sapiens
accccaaaggaaagacacagggccgcaagccacagggaccacagccgcaaagagcccaggagaggaaagc

SEQ ID NO: 242664 - RNA, 34 nt, Homo sapiens
agccacacggcagaaaaagagacgccgccagcca

SEQ ID NO: 242665 - RNA, 81 nt, Homo sapiens
agagcaagccaaagaccaaggggggggcacccccacaacgcagaaaaagccaccggagcgaagcgaaggaagcgaggacaa

SEQ ID NO: 242666 - RNA, 40 nt, Homo sapiens
gagggagcgcaggggaaggcgaccaacgacgaagagcaga

SEQ ID NO: 242667 - RNA, 72 nt, Homo sapiens
aaggagccgacccaacaaagggggccagggccaggccaccagggcggcacccaccccccgagcccgcccgcc

SEQ ID NO: 242668 - RNA, 76 nt, Homo sapiens
gaagaggcccaacccccaccccgcccaaggaggcccagcgaaaagaaacgaagccgggcacggacaggacagagaa

SEQ ID NO: 242669 - RNA, 54 nt, Homo sapiens
aggaaacaggaggaagaacccaagccaaagcccaggcaaggcaaggaggaccaa

SEQ ID NO: 242670 - RNA, 76 nt, Homo sapiens
caagcaggaccacccaccagccaccagggagaccacgaaagccagacacgaaccccaaagaagcgagaacggcaag

SEQ ID NO: 242671 - RNA, 92 nt, Homo sapiens
gagggaagccggaaacaagaacgggcggcagggggggggaagaacgaggaacgcgcacaccacccaacaacagacccaggaagccggccagg

SEQ ID NO: 242672 - RNA, 74 nt, Homo sapiens
gaggccacagcccggacccacgaccccccggccagacaagggcccgaagaccgccggggcccagagacacacgg

SEQ ID NO: 242673 - RNA, 52 nt, Homo sapiens
cccgcgcggcgcggggaccgcggcccgcgcagagccagaaggccacgcccaa

SEQ ID NO: 242674 - RNA, 63 nt, Homo sapiens
acccaggaacaaaccgggggcaaggccaaaaagaaggggaggcaagcaggggggcaaaggaaa

SEQ ID NO: 242675 - RNA, 76 nt, Homo sapiens
agacaggagggaggaacagacaccgagccagcaagcccccaacgcgggaggccaccgccccaccagcaggcaacgc

SEQ ID NO: 242676 - RNA, 42 nt, Homo sapiens
agagggcgacaaggaaacgaaaaggacccagagaagcacgac

SEQ ID NO: 242677 - RNA, 42 nt, Homo sapiens
gacaaaagcaacgaccgaggacaagaaggccaaacagccaca

SEQ ID NO: 242678 - RNA, 63 nt, Homo sapiens
gggaccgacagagaagccaagggccacaagcacacccccccagaagagggggaaccgacacgc

SEQ ID NO: 242679 - RNA, 72 nt, Homo sapiens
agcccaccgagccgcagccagcggggacgaggcacaaggcacaaagcaggaggcaggaggccaggaagaggc

SEQ ID NO: 242680 - RNA, 70 nt, Homo sapiens
gaaagcgaaaacacacggaagagcgcggccagcaccccaacgggccaaagaagcccaccagaggcgaggg

SEQ ID NO: 242681 - RNA, 75 nt, Homo sapiens
gaaaagcccagcaaagccgacagcagaagaagcaccaagaacaagcagaaagcacgaacaacgagaacaagacac

SEQ ID NO: 242682 - RNA, 77 nt, Homo sapiens
ccagaaaaaccaaggaaaagagcaagcaacagagcgcgggacgggcaaaggaaaggaaaacaggaaaagccaaccgg

SEQ ID NO: 242683 - RNA, 69 nt, Homo sapiens
acaagagcgaccagcagacaccagagggacgaggccggaaccaaacgcgcgcaaagggagccaaccgaa

SEQ ID NO: 242684 - RNA, 39 nt, Homo sapiens
ccaccccaacaggaaacaagggaccaagaaaggcccagg

SEQ ID NO: 242685 - RNA, 102 nt, Homo sapiens
cccggggggggcgccggcacccacccccgcgcgcggcgcgacaggccaaacgaccaagaaagcgggacgcggaaaacgggacccgcaggggcccccccggaa

SEQ ID NO: 242686 - RNA, 62 nt, Homo sapiens
ccccgccaggccgcccggcgcgagggggaccagcgaccaaggacagaacaagcgagggaggc

SEQ ID NO: 242687 - RNA, 73 nt, Homo sapiens
cgagcgccccccgagcggggggacgcgccaggcacagcagcagacaccgcaagccccacccggcacagccgcg

SEQ ID NO: 242688 - RNA, 76 nt, Homo sapiens
gggcacgaacgcacgagaaaagggcgccgcagagaaagaacgaaggcacagcgacccaggaaaaaaaccaccagag

SEQ ID NO: 242689 - RNA, 52 nt, Homo sapiens
cccgaaacgggggaagaaggagagggaaagaagaaagcaccccgcaaaagaa

SEQ ID NO: 242690 - RNA, 64 nt, Homo sapiens
gccccccgagcggggggacgcgccaggcacagcagcaggggcagggaaggccgagccagccggg

SEQ ID NO: 242691 - RNA, 55 nt, Homo sapiens
gaagccagggacacacggagagaacgcgccgccggccggggcgcagggacacggg

SEQ ID NO: 242692 - RNA, 48 nt, Homo sapiens
agggacccccgggaagaagacacagaaaacaggcccgaagggaaacaa

SEQ ID NO: 242693 - RNA, 64 nt, Homo sapiens
accaggacgcgccgaaacaccaaaagcgggggaagaagagaggacgggaaaccagacgaaacaa

SEQ ID NO: 242694 - RNA, 78 nt, Homo sapiens
aaggccgagagccggaacaaacgagggcccgggaggaccgacgcagccaggacaacagacacaggacaaggccaggga

SEQ ID NO: 242695 - RNA, 77 nt, Homo sapiens
ccacaccgaggcacccgaagaagagaccaccaaccagggcaggccggagagcgacccgacaaggcccacgcccacca

SEQ ID NO: 242696 - RNA, 66 nt, Homo sapiens
agaaagccaacaagaggaagcaggaaaaacaaagaagacccaggcaccaaggaggccccggccgaa

SEQ ID NO: 242697 - RNA, 63 nt, Homo sapiens
ccgacagccgcagaaccagggccgggaccgaagcggccggggacccgcggagggcaggagcgc

SEQ ID NO: 242698 - RNA, 111 nt, Homo sapiens
gcggacgggaaggcgggagacgagaagccgaaaagcgcagcgagcggagccgccggaggccagggcagcagagcacggagggcaggagccaacacagggacgagacccgcg

SEQ ID NO: 242699 - RNA, 43 nt, Homo sapiens
cgcccggcagcgccccgcgagaaggccaaccgccccccagcag

SEQ ID NO: 242700 - RNA, 74 nt, Homo sapiens
cccggccacccagccgcccggaaggccaagaaaacaggaacgagggaagaaaacgccagagaagcagagcagcc

SEQ ID NO: 242701 - RNA, 78 nt, Homo sapiens
caccgcgccggcccagcaccccgagaaccgcaggagccagagacaaggaacaacaaccgaaagccacccacacaaaca

SEQ ID NO: 242702 - RNA, 75 nt, Homo sapiens
ccacagaccccagaaacgggcaagcgcgcaaacccagaaaaaaaaccgggaagaccgacggagccccagcagaag

SEQ ID NO: 242703 - RNA, 38 nt, Homo sapiens
gccccgcccggcggggaaggcggcggccggggcagcgc

SEQ ID NO: 242704 - RNA, 73 nt, Homo sapiens
caaaccaaacggagcgggcagcaggaagggacggcgcgcgacccggccgaaccacgcgcgcaccgcggaacgg

SEQ ID NO: 242705 - RNA, 80 nt, Homo sapiens
gacacacggcggcacacgcagaccgcaccaggagacaagccgggccgcccgcggcagagcagcagagcgccgcccacaag

SEQ ID NO: 242706 - RNA, 75 nt, Homo sapiens
ccccccaagcaagggcagagccccacaagagaaccccagagggcgcggaagccccagcaaacaagaccaccggca

SEQ ID NO: 242707 - RNA, 71 nt, Homo sapiens
agcggggacccaggagccggccagcgcgccggagccgccgaggggcgaggcgcgaaggagacagaggagca

SEQ ID NO: 242708 - RNA, 87 nt, Homo sapiens
acgaggcggaagaccgcgcgcagggccgcagcgggagcggacggcgagcgcgagcggcgcgagaaacacgagagacaaggaggggcg

SEQ ID NO: 242709 - RNA, 36 nt, Homo sapiens
aaaaggaaccggccccggggcgaccgaggcggagga

SEQ ID NO: 242710 - RNA, 55 nt, Homo sapiens
agagcgcacacggacccggacccaccccgcacccgagacggggcaccacgggcca

SEQ ID NO: 242711 - RNA, 82 nt, Homo sapiens
gcaagggaaacaacgcgcaaaccagccagcacgggggcccagccagccagcagcgaggggggacggaggcggcacggggcca

SEQ ID NO: 242712 - RNA, 80 nt, Homo sapiens
caggaggaagaacaccacccgcaagggcaagaacacaagcacggaccggcagaaagccaaccgcggaccgccaaaccgcc

SEQ ID NO: 242713 - RNA, 71 nt, Homo sapiens
gaagagaagcaagggccccaagcgcacaggccggaggaacgaaacagcaaggagaaccaacaaccgccgac

SEQ ID NO: 242714 - RNA, 80 nt, Homo sapiens
aaggcgcaagcgagaggaaacgggccccaaggcgaccggcaaaagcgagaagcagaaagccaaagaaagaaagaggaaga

SEQ ID NO: 242715 - RNA, 76 nt, Homo sapiens
gaaaaaggagaaaacaagacaagcccacacagagcaagcaagaaccaaacaagacaaaggaggcagcaaacagcac

SEQ ID NO: 242716 - RNA, 72 nt, Homo sapiens
cccccgcgcaggaggcggccagcgggccgcagccaagccggaacaggagcggcgagcccaaacgcaaggggg

SEQ ID NO: 242717 - RNA, 54 nt, Homo sapiens
aaaacgcacggaaagacccagaaagccaagacaaaagaacacacagggcagaag

SEQ ID NO: 242718 - RNA, 63 nt, Homo sapiens
cgagggaagcggggcgcccacgggccgggcggcagccgcggagagagagacgggggcaccaga

SEQ ID NO: 242719 - RNA, 71 nt, Homo sapiens
gacggacccgcgcggggcgccacggccggcaggccgacggagaccgccccagggccaaccgggcaggccag

SEQ ID NO: 242720 - RNA, 80 nt, Homo sapiens
cgagcgaggcaacgggccacccacgcagaccagaagccagcagaacggccaaggcacgggacaagccaccaggccccacc

SEQ ID NO: 242721 - RNA, 88 nt, Homo sapiens
ggcccgggagggaggccggccaggccggccgcgccgcgaggagacagaaggcaaacaccagcaacacccgggacaaaaacgggggcca

SEQ ID NO: 242722 - RNA, 78 nt, Homo sapiens
caggcgagcagaaccagcggcagcaaaagaagcgaaccgggagcgacacaccccagagagagccgacagggaaccagg

SEQ ID NO: 242723 - RNA, 81 nt, Homo sapiens
gggcccaacaccaacgagaccacaccagccccacgcgggaggaagagagaacagccaaccaccaaagaagacccccagaca

SEQ ID NO: 242724 - RNA, 59 nt, Homo sapiens
cagcccccagagcggaacacagaaagacaacaaaggcgcaagcacaaacaagccgaaaa

SEQ ID NO: 242725 - RNA, 76 nt, Homo sapiens
aagacgccccaccacgaggccagcacgggaacgcgaagcgccaaagccagacaaagaacaacagagagggaacaga

SEQ ID NO: 242726 - RNA, 72 nt, Homo sapiens
gcaagacggagccccaggaacaggcgacgcccggaagggcaaggcgggcgcggacggcaggggcgccgggga

SEQ ID NO: 242727 - RNA, 92 nt, Homo sapiens
ggcgacggcggggcagcgcaccggcaggcgggcgcagccagagaaacagcaaaaaaccaacaaaagccccagcacaagagaaccaagcacca

SEQ ID NO: 242728 - RNA, 76 nt, Homo sapiens
ccaacccagagcaaagaaacgccggggagagccggcccccgagccgagccgaagcggacggacgcgccacggccac

SEQ ID NO: 242729 - RNA, 86 nt, Homo sapiens
ccggggaccgcaggggcgcgcgaaggagcggaagaaggcaggccaaaccaccgaccagaccgccagagcggaacgaccccagagcg

SEQ ID NO: 242730 - RNA, 84 nt, Homo sapiens
ggcggagaaggcgagccccgggacccccacaccaagacgcagcagccgaggcccagacccaccagccagcaagcaaagcaggcg

SEQ ID NO: 242731 - RNA, 74 nt, Homo sapiens
gacaaggagagaagcgcggagccccaaggccggaaaaacagggagagccacagagggggaaagccaaggaaaaa

SEQ ID NO: 242732 - RNA, 82 nt, Homo sapiens
acggcggggccgggcccccggccgcaagcagcgccacccgacagagaaaaacaaaagggacagcgcacggagaaaaagacgg

SEQ ID NO: 242733 - RNA, 79 nt, Homo sapiens
agccacccaagagacaagcaggcaacagaggagaagaggaagaggaaaccagcaagaaggcagggggacagaagcgaag

SEQ ID NO: 242734 - RNA, 73 nt, Homo sapiens
cgcgacccggcgccccgggccgcagcgcgagcgacgggcccaaccgaccagaaggaaagcacaaacgggggag

SEQ ID NO: 242735 - RNA, 76 nt, Homo sapiens
aagggaaaggccaaaaaaagcagaaacggccaccacccgcgcgaaccaagccaacaggcgcagggccacgccgaac

SEQ ID NO: 242736 - RNA, 92 nt, Homo sapiens
acaacacaggggcgcccccccgccaggggggcgcacaggagcgcgagccaacaggaaggccgggggcagcacaccgcagccggagcgaccaa

SEQ ID NO: 242737 - RNA, 72 nt, Homo sapiens
ggcccccgcaggcccgccacacgacccggacaaggcaggggccgcaaggccaggcgcgcagaggcacccaac

SEQ ID NO: 242738 - RNA, 75 nt, Homo sapiens
gacccgcgccggagacaagggcacacacgcaccagaagaagagcaaagaagggcagagacacggagcaacaagcc

SEQ ID NO: 242739 - RNA, 77 nt, Homo sapiens
cgaggccaacaccccgcaggaagcccacggaacacagagaggcgcagggagcggccgcccaggagagcgccaccgca

SEQ ID NO: 242740 - RNA, 58 nt, Homo sapiens
gcgccggagcagcggacccaggcaggcaccaaaaaacgacagaagaaccgagaaaaag

SEQ ID NO: 242741 - RNA, 70 nt, Homo sapiens
ggagggaaggcaagagccaacccaaaaccaagaaaagaaggaggccagcgggacacacaaagaaagacga

SEQ ID NO: 242742 - RNA, 74 nt, Homo sapiens
gccgccgccaagcccggcccggcccgacaccgcgggccgccagacgggaagggacaaggcacgaggcgcggcga

SEQ ID NO: 242743 - RNA, 47 nt, Homo sapiens
cagcgccacagacagaaaagccggacacaagagggcaagaaaggcgc

SEQ ID NO: 242744 - RNA, 88 nt, Homo sapiens
gcgggcgaggcggcccagcggcggcaggcacaccagcgaccggaaggcaggacaagaacgcagacagcgaggacagcaacaggagccg

SEQ ID NO: 242745 - RNA, 71 nt, Homo sapiens
ccaaagcgaccccgaaaaaaagaggagcccgcaagaggccagcgaaaaccgaaggcccagaaaaggcaaag

SEQ ID NO: 242746 - RNA, 86 nt, Homo sapiens
ccaaacccagggagcggaagacgcgaccaacccaggcacagcggagccggcgcggggccacaaaggcagaccacagggcgcccgcc

SEQ ID NO: 242747 - RNA, 78 nt, Homo sapiens
gcaggcaaaccccgccagaggcagcagggccaaccaggccacgaggagggcacgcggaggagacgaagaggaggccgg

SEQ ID NO: 242748 - RNA, 97 nt, Homo sapiens
agagggcgcagagggcgaggaggagaacccaccaagccccgcaggagccaccagacggagcagagcaggcacagccagagaacaacacacacacaca

SEQ ID NO: 242749 - RNA, 83 nt, Homo sapiens
cggcgccaggaacggggccccccgcgcggcggcgcagccagccgcagccagcgaagccacagcaggggagaaaacagaacgcg

SEQ ID NO: 242750 - RNA, 78 nt, Homo sapiens
gaaccagcacaggagacggcagcccccagggagcaggggccagcagccgccccccgcggaccacggcgcgccccgagg

SEQ ID NO: 242751 - RNA, 75 nt, Homo sapiens
cgagcaaggcccccacccccccgagggcgggggaaagggagcagcaccggccacacccacagcacgaccggaacc

SEQ ID NO: 242752 - RNA, 42 nt, Homo sapiens
aacggagcgaagcagagccagagaaccgcagccagaagcaaa

SEQ ID NO: 242753 - RNA, 71 nt, Homo sapiens
cggggccccacacccccccggggggggggggaagagcaaaaaagacccaaaaaaggcacccaacacaccac

SEQ ID NO: 242754 - RNA, 84 nt, Homo sapiens
aggcgaccccagaagagggagggagcgaacgccaacacgagccagggaaacgcagagaccagagaaagcacacagcgagcccgc

SEQ ID NO: 242755 - RNA, 40 nt, Homo sapiens
cagaagcccaaaccgggaacggccagccggcgccccgccc

SEQ ID NO: 242756 - RNA, 78 nt, Homo sapiens
gagcccccacagggagaaaccccacccccaagaaccaacccccaaaggcgggacagagcacaggcaaccagcgccacg

SEQ ID NO: 242757 - RNA, 74 nt, Homo sapiens
gcgccacccacaaccagcggggagcagaacaggccaacgcaagggcgagcaggggagaagggcgagacgcccac

SEQ ID NO: 242758 - RNA, 73 nt, Homo sapiens
agccgggcgagggacggccaaagggaagagcacgcacagcaacccgcaagagccccgacacagacgcggccaa

SEQ ID NO: 242759 - RNA, 57 nt, Homo sapiens
cacagcagacccaacggcaaccgagacgaagacaaggcggaagccaccagcccgaac

SEQ ID NO: 242760 - RNA, 65 nt, Homo sapiens
gcaacaacagaaccggacagaagcgcaaaaaacgcaccagaacacacaagaaccgggagaacgaa

SEQ ID NO: 242761 - RNA, 70 nt, Homo sapiens
gggccgcaccagcgggcggagcgcgggaggacgggagccgcgaccgccgcgcaagcgccggccccggcgg

SEQ ID NO: 242762 - RNA, 87 nt, Homo sapiens
ccccggcgccaccaccgacgagcgaagagcaagacaagcagaccggaagaccgacggaagaccacaccccgagggagcccaggacac

SEQ ID NO: 242763 - RNA, 107 nt, Homo sapiens
cagaagagcccaaaaccaacgaaccaaaagcaaccgcgaagagcagacaccggcgcagaccccccccccccaccggccacccgaaagaagaaggacagcgaaggccg

SEQ ID NO: 242764 - RNA, 82 nt, Homo sapiens
agggacaacaaaagccccacaagagccaccaaaagccaccccagagaagaggacgagagacaagacaaccaaaagggaaacc

SEQ ID NO: 242765 - RNA, 71 nt, Homo sapiens
aacccacacaacggacaacaagcagggcacgagacggaaaagaaaagccaagaggaaagccgagggaaggg

SEQ ID NO: 242766 - RNA, 75 nt, Homo sapiens
gcggcagcacgcggcggcagccgggagccaccaccacaacaccgagggacgagaccaccaggacacaggacgccg

SEQ ID NO: 242767 - RNA, 36 nt, Homo sapiens
aggcgaggagcggggaggaggacagcacaaaaacac

SEQ ID NO: 242768 - RNA, 81 nt, Homo sapiens
aagagacccaagaggaaaagccggcaggaggacccggcaggaggacccacccagcacacggcccacgaagggcaccaacag

SEQ ID NO: 242769 - RNA, 82 nt, Homo sapiens
aaccgccacacgaccgcagcagcacgcgccacggcaccgcgccggaacgaggggggcgcccaacccccgaccggaacaggga

SEQ ID NO: 242770 - RNA, 74 nt, Homo sapiens
agcgaaggccccgggaggacaagaagaagggaaggaagacagccagcaggggcagaagcagcagacggaacgag

SEQ ID NO: 242771 - RNA, 84 nt, Homo sapiens
agaggagcgccccgcgaggggagaacaacaaggaggcgcgccacccaggagcaggccccagagaaggagaagagagagacgcgc

SEQ ID NO: 242772 - RNA, 88 nt, Homo sapiens
agaacccagaggcgggaggggccgggaggcagaggggcaggggaagggaaaaggccgaggcacagcgggaagaccgcaaagacgaccc

SEQ ID NO: 242773 - RNA, 71 nt, Homo sapiens
gagaaacagaacgcgaacagacagaggggcgaagaagcagcagcagaggaaaaaagagaccgagagaaagc

SEQ ID NO: 242774 - RNA, 75 nt, Homo sapiens
ccgaagcaaagaggaggaaggagggaccggcccccagcaagccccagaggggggagcccccaaaaggcggccagg

SEQ ID NO: 242775 - RNA, 68 nt, Homo sapiens
caagacaccaagggacgcagcggaagaaaagaaaggggggaaccgaagagcaaggaaaagaaaagggg

SEQ ID NO: 242776 - RNA, 79 nt, Homo sapiens
gaaaggacacgggagaaagggagccgagcgagaccacgcaccacgggcgggcagaccagaaacgggggcagagccggcc

SEQ ID NO: 242777 - RNA, 75 nt, Homo sapiens
gcggcgcagccaccagagcccagcaggaggacagaaagggaccgagggggacgaaagcggaaaaccgcaacagca

SEQ ID NO: 242778 - RNA, 38 nt, Homo sapiens
accaaaggaggaccgcagagcccccgagaagccacgcc

SEQ ID NO: 242779 - RNA, 84 nt, Homo sapiens
gccgcagcccgagcccagaaggcggcgaccgggcgcgggcaaggcggacaacggaggaacaaaccaggggccggccaacagaac

SEQ ID NO: 242780 - RNA, 56 nt, Homo sapiens
ggaaaaagcacagggaaccaaacacccccagaaagggacagaacgcggcagaacgg

SEQ ID NO: 242781 - RNA, 73 nt, Homo sapiens
gagcagacacgcaaagaagcccgaggcgcaagagacaacaggcaacaggaagaagaacccacaggggccaaca

SEQ ID NO: 242782 - RNA, 48 nt, Homo sapiens
cacggaagaaacgcaacccagcagaggcaaggcggcagcaaaacgggc

SEQ ID NO: 242783 - RNA, 57 nt, Homo sapiens
aaacaccaagcacccagcagaacacgagaaccaagcagaaggaagaagcgaacacag

SEQ ID NO: 242784 - RNA, 73 nt, Homo sapiens
gcaggccgccagggggccagagggaccgaacgcccgcagaagagagaagaacacgaagaaaaaaaaaaaggaa

SEQ ID NO: 242785 - RNA, 72 nt, Homo sapiens
ccagcagaagaagcgggaagggcccagcagcgcggccaccaccacagcaagcaccagcagacccaaacaaac

SEQ ID NO: 242786 - RNA, 78 nt, Homo sapiens
gaagggaggcggcggccccaaaacggccccggcagcaaacagacgggacgcgagggagcacaaaggcaaagagaagca

SEQ ID NO: 242787 - RNA, 50 nt, Homo sapiens
cgaagaggcaccggaggaggacaaacagcaagacaagacagccaccccac

SEQ ID NO: 242788 - RNA, 77 nt, Homo sapiens
gcgggcgaggagaccgccagggagggcagagccaaccaggacacaaacagccagagaaacccccgccccaacaagag

SEQ ID NO: 242789 - RNA, 79 nt, Homo sapiens
ccccgccgccgccgaggaggcgagcagccgggagacaccgccaccgccagaacgcggcagaacggaggcaggcagcacg

SEQ ID NO: 242790 - RNA, 43 nt, Homo sapiens
caacagcggagccaaggcaacagaaggccaaggacaggcgcag

SEQ ID NO: 242791 - RNA, 83 nt, Homo sapiens
acacagacgggggcgagcggacccgcagccccaaaacgccagcagcccggacgccaccaagccgagccacgggcagcgggcga

SEQ ID NO: 242792 - RNA, 88 nt, Homo sapiens
gaccggaccaagcaagaccccacccagcggccaccccccaagagaaagaagccaacacaaaccacaaaaacaacaaggccaccaaacg

SEQ ID NO: 242793 - RNA, 105 nt, Homo sapiens
cccccaacggcacggaggccccaacaccagaagccgcgggcaccaaacgcagggacacggagacccaaccaaggagcacaggagcacaaagaacggaccacggcg

SEQ ID NO: 242794 - RNA, 69 nt, Homo sapiens
acaaacacacgcccagaaagagcagcgcgccagcagaagaagagaacacgccaacaagccaaaggaaga

SEQ ID NO: 242795 - RNA, 75 nt, Homo sapiens
cacccacccgccccccggaccggggggagacccgcgaccgccagaaggcacagcacaggggagcccgccaccccc

SEQ ID NO: 242796 - RNA, 70 nt, Homo sapiens
cagagcccaaaccccaggccaagcagccaccagcagcccccagagcgggaccacagaccgagcccgggaa

SEQ ID NO: 242797 - RNA, 81 nt, Homo sapiens
ccgcaccgaccaggaccacagcggcaaggcccaagcccagccaagcaaaagacggaagagagagcagcccagccaccggac

SEQ ID NO: 242798 - RNA, 70 nt, Homo sapiens
gggaccagaccacaaacagaaccgagcccacacacgccacaaaccgcaaggagaacaggaagcgggcagg

SEQ ID NO: 242799 - RNA, 81 nt, Homo sapiens
aggggggacaggccgcgcacggcaacaaccaggacggcccaaagaggcacacgcgacgcggccaggaacaacagaagagaa

SEQ ID NO: 242800 - RNA, 85 nt, Homo sapiens
gcgcaaacaagccaacccaggaggaaaaacgaggcagaggacagaaggaacagagaccgccaggggaaagccccgcgaaggcccc

SEQ ID NO: 242801 - RNA, 82 nt, Homo sapiens
ccgcgccgccgccaccgcggccgagaccgcgcagccggcgggcccaacaacaacagaagagaagagaaagaaggggacgaca

SEQ ID NO: 242802 - RNA, 80 nt, Homo sapiens
gggggaaaccaagaccccaggacaacaaggaggcagagccagagcccaagcccccgcagggagcccaccgcgaccaggac

SEQ ID NO: 242803 - RNA, 85 nt, Homo sapiens
agaggagcagaaggagcaaaaggcggacaggcagggacgacacaagaccaccaccaccgcggacggccggcgcggaagcggagcc

SEQ ID NO: 242804 - RNA, 78 nt, Homo sapiens
gaaaagcaaagcccgggacaggacagcgcaagcagggggcccacgagaagagcaggcgacgggggagagggagacagc

SEQ ID NO: 242805 - RNA, 107 nt, Homo sapiens
aggaaaaagggcaagaaagaaagcccgggcaccaggcccagagacccagagggaaaacagcccccggccgggaccaggaggaacaagagaaggcccgacagagaggg

SEQ ID NO: 242806 - RNA, 69 nt, Homo sapiens
ggagcggcgcagaccgagacccggacagggcaggaaacagaaaacccgcagcccaaagggcagaagaag

SEQ ID NO: 242807 - RNA, 105 nt, Homo sapiens
ccggcaaagcagaccagccgccagggaagacagaagccgccaccccggcccaaagaaacccaggacaccccccgcggaaaaaggagaggggggccgggcccaaga

SEQ ID NO: 242808 - RNA, 70 nt, Homo sapiens
gaggggaccagccacaggaggcggccgcacaaagaaccgagggcaccggagggaagcgggccaccgcccg

SEQ ID NO: 242809 - RNA, 57 nt, Homo sapiens
gacccggaaggacggcgaggggcggagaacggaaaagcaccaggaagcagagaggac

SEQ ID NO: 242810 - RNA, 83 nt, Homo sapiens
gaaggaccgcggacccgccccgggacagcgaggagcgagggacccgacaacacaccgcccaaccgggacaaagaaaggaaaag

SEQ ID NO: 242811 - RNA, 80 nt, Homo sapiens
gaaggaccaagaaccaggcaaggggagagccaggcgcagagcccgcaaccagcagccagggagaaggggaagcaggagcc

SEQ ID NO: 242812 - RNA, 69 nt, Homo sapiens
ggaggaagcccccagggccaggacgcccggaccgcccagcagccccgggagagacccagccaccaccaa

SEQ ID NO: 242813 - RNA, 34 nt, Homo sapiens
cgcggagacaagagaggagcccgcagcggcccgc

SEQ ID NO: 242814 - RNA, 60 nt, Homo sapiens
agggaaccaacccacccggcgccgcggcccaaaaggcacgcgaaaccaagagaaagaaga

SEQ ID NO: 242815 - RNA, 57 nt, Homo sapiens
agggccaaagaagggagagaggaaagcacccgcagcggggacagcgagggggaggga

SEQ ID NO: 242816 - RNA, 76 nt, Homo sapiens
cgccaccagagcaccgaaggagaggaaagacccacaggcagggaccaaccagcaggcagccggaaaccacgaaaac

SEQ ID NO: 242817 - RNA, 73 nt, Homo sapiens
gccagaagaaggaccggaagcacacaacaggaaaacaaaagaggagaaaggacaccagcaggaaaacacgggc

SEQ ID NO: 242818 - RNA, 75 nt, Homo sapiens
acccagcagcgccgagaagcccccggggagacaaggaaaaaggaaggaaagcgaggccggaaaaaggccagacag

SEQ ID NO: 242819 - RNA, 75 nt, Homo sapiens
caaacacaacacagacaccaaaaaaaagccaccaccgaaacgccaaaaagaaagaagcagagccagagacaccga

SEQ ID NO: 242820 - RNA, 60 nt, Homo sapiens
caaggggcaagccacaagcgcgagcaagacagaaaaggaacacgcgggaggacagaggaa

SEQ ID NO: 242821 - RNA, 72 nt, Homo sapiens
ggccggcgcccgcacccaccgagaaccagccaccgacccggagaaaccagaagaagacacacaggggaaaag

SEQ ID NO: 242822 - RNA, 79 nt, Homo sapiens
aggaaggacaagggaacccccgagcggcccggggagccaagcagcccggaggagacgacggcccgggacccgaaggcac

SEQ ID NO: 242823 - RNA, 71 nt, Homo sapiens
cagaccggggagggaaagaaaaaaggggaagcaggccaaagaaacagacacaaaagccacacccgaaaacg

SEQ ID NO: 242824 - RNA, 80 nt, Homo sapiens
caggagagcgccccagggcaagccccgcccggccaacaaaaggcacaagggacaagcaacgagagcccggagccccgggg

SEQ ID NO: 242825 - RNA, 80 nt, Homo sapiens
gacaagccaacaccacaccaggcgagcacacagagaggggaagggcagcagcagcagagaaccaaacccaaagcgaacac

SEQ ID NO: 242826 - RNA, 77 nt, Homo sapiens
gcgcaccgacccgacgcgccggcccacgcgcggccaagaggaagacaccaccggacaccgaccaggccgcccgagca

SEQ ID NO: 242827 - RNA, 76 nt, Homo sapiens
cggggacccaggagccggccagcgcgccggagccgccgaggacacgagaaacaagaacaccggaaggaagaggaag

SEQ ID NO: 242828 - RNA, 71 nt, Homo sapiens
ggaaaagggccagcggagcgaccagcgcgggccccgggccaccagggaccaccaccggggcccacgcgcac

SEQ ID NO: 242829 - RNA, 62 nt, Homo sapiens
gagaaggaccgaaggagccagcacgccagcccacgaacaccgcggagaaaacgcccagcaag

SEQ ID NO: 242830 - RNA, 35 nt, Homo sapiens
cgagcgagaccgcaccagaggacagagacacggag

SEQ ID NO: 242831 - RNA, 82 nt, Homo sapiens
cgacggaagcgaggaaaagcagagccccagggacccacggccccaaaagaacgaccaaaaacgcagccaagaaaaggacgag

SEQ ID NO: 242832 - RNA, 61 nt, Homo sapiens
cagcccagagcgcaaagaggccagaaccacacggcagaggcgcaacagggcgcacgcaggc

SEQ ID NO: 242833 - RNA, 85 nt, Homo sapiens
gccggcagaagaagcgaacaaaggaggacaagcaccccgagacgggacacgccaccccaccaggcagaaccccggggccaacagc

SEQ ID NO: 242834 - RNA, 81 nt, Homo sapiens
gaaacaaaaacacacccagggaggcaagcagagcgcggccaagaacagaggaaggggacaggacacccagcaacagaccga

SEQ ID NO: 242835 - RNA, 76 nt, Homo sapiens
ccagcacacaaggaccagcggcccccacaccccccgagccggagcaccaaaaccaccccgaaacaacggacacccc

SEQ ID NO: 242836 - RNA, 79 nt, Homo sapiens
cggaaacgacagaagcagagagcagaaggcaggcccacgagcagaggaacacaccaccgagaccccgagcgccaacacg

SEQ ID NO: 242837 - RNA, 79 nt, Homo sapiens
gagacaacggaagagacaggggacgcggcaaggggcaaaagcagcgagagcaagcagaacggaacgcgaggaagaaagc

SEQ ID NO: 242838 - RNA, 93 nt, Homo sapiens
agggacacagccggcgcgagcgggaggccccagggaggagagggccggcggcaacggcacaggggccaggcacaaagagggcgggacacccag

SEQ ID NO: 242839 - RNA, 82 nt, Homo sapiens
agaaaaaggaggaacagagggggaaaagcaagagaaccacccaaaagaccgaagcagaagacaccacggacagcagaggacc

SEQ ID NO: 242840 - RNA, 58 nt, Homo sapiens
aaaagagaagccacgccaagcaaacagcgagaagagcggagggcccgacaagagaggc

SEQ ID NO: 242841 - RNA, 118 nt, Homo sapiens
ccgcgccccccggacgcgccaaagccacacaagcccgcaccaaagcgcaccgcggacgcacacaggaaggcgcaccagacgcacgaccgcccggcggcgcgggcacgggcgaggaccg

SEQ ID NO: 242842 - RNA, 71 nt, Homo sapiens
gaacaggcagcaggaagcacggcgggcgaaacagcggcgggcacaagccaaggaagagagaagagccaagg

SEQ ID NO: 242843 - RNA, 55 nt, Homo sapiens
cggaagggccggggccgcgaggccgggagcccacccaggagagaaaagacacagg

SEQ ID NO: 242844 - RNA, 52 nt, Homo sapiens
ggcagaaacagaggacaaggcagcaaagaagaggggaggcaagcaggggggc

SEQ ID NO: 242845 - RNA, 75 nt, Homo sapiens
cacccagccaccagacgcccccaggagcaaaaacaccacggcagccagcacaaacggaggggggcgcccacgccc

SEQ ID NO: 242846 - RNA, 77 nt, Homo sapiens
cggaagccgcccgaccggagggagcagaaacgggagaaaggaaagaagaaggcaacaagcaaggaagacgaccagag

SEQ ID NO: 242847 - RNA, 75 nt, Homo sapiens
acgagcgcaacagcgaccaccggaggagcaggcaagcggcaccacgacaaccccacaccaacgagaggcaacgcg

SEQ ID NO: 242848 - RNA, 73 nt, Homo sapiens
acggggagagaaagaaaaggaacgggagcgagagaagcaagaaaggacagcaaagcgaagaagcaaagaaaga

SEQ ID NO: 242849 - RNA, 68 nt, Homo sapiens
ggagacagaggaagccccagaggccacaaggcaggagcgaggggcagcgagaaaagccgacgcaagag

SEQ ID NO: 242850 - RNA, 72 nt, Homo sapiens
cagaaggccagccccaccaccccgggcccacgacgcgaaccggagacgacaaggcaacaagcgaacgcgacc

SEQ ID NO: 242851 - RNA, 76 nt, Homo sapiens
agcagcaaaaaaagcaaagacgaacaagaaaggagcaaccaaccacaggaggacaagacgaaagcacccagccgcc

SEQ ID NO: 242852 - RNA, 73 nt, Homo sapiens
aagcaagagaccagagcccaaggccaaagagcacagggacagaaaaacagcgcagacgagccgcaaggacaag

SEQ ID NO: 242853 - RNA, 76 nt, Homo sapiens
gagcaagaagcaggaaaggccggacaccagacaagcagaccggaagaccgacggaagaccacaccccgagggagcc

SEQ ID NO: 242854 - RNA, 75 nt, Homo sapiens
ccccaggccccaaaagccagcaaagccacgcacaaaagacccaagggggacagcggcaaacagagagggacaaca

SEQ ID NO: 242855 - RNA, 75 nt, Homo sapiens
gaagaagccaggaaaaaaagagaaacaagcgaagacccccgccgaagaaaccacgccagacgccaagacagcccc

SEQ ID NO: 242856 - RNA, 79 nt, Homo sapiens
gaaaaggaggaacgccggcccgagaaagcccgccagcagggccagccaaagaggagaacacgccccgacccagccccca

SEQ ID NO: 242857 - RNA, 82 nt, Homo sapiens
cgggggcggggggccgcccgaaagccagcccaaccagagcagcagcggcgagaggaggaagcaacgagcaagccaaaaaccc

SEQ ID NO: 242858 - RNA, 71 nt, Homo sapiens
cgagggggggcgcgccggaaaccggagcgcgcagcagcagcgcgcagacaggacaaccagcggaggcacga

SEQ ID NO: 242859 - RNA, 74 nt, Homo sapiens
gcagcaaaccgaccacagaggcagccagcaggacacagacgacgagaagcacccacaagccagaccaccgggag

SEQ ID NO: 242860 - RNA, 81 nt, Homo sapiens
agacgggccccaagaggccagccccccgagggcaacgagaaagagacggcccaaaacagggagagcgccacccacagagcc

SEQ ID NO: 242861 - RNA, 75 nt, Homo sapiens
gaaaaacaggcccgacccgaccccaaaagagacggacgcacaggaaggaaaaagcagaaaacacagagaaaacac

SEQ ID NO: 242862 - RNA, 78 nt, Homo sapiens
gcacccgccacggaagcaagacgaaggcccaccaccacgagcgcggccaccaaccccggcagaccagagcagcccagg

SEQ ID NO: 242863 - RNA, 73 nt, Homo sapiens
gagccgggccccaacaacccggcacaacaacagcaacggaggcgggaccggaacaggcacaccccacacaagc

SEQ ID NO: 242864 - RNA, 94 nt, Homo sapiens
cccaccccggaaccacagaacaggcgaagaggcaagaaaaggaggaagacagcgaacccccccaccacaggagcccagacccgggcacggcaca

SEQ ID NO: 242865 - RNA, 35 nt, Homo sapiens
aagcaggccggggacgaaaaagccgggacagggcc

SEQ ID NO: 242866 - RNA, 72 nt, Homo sapiens
ccaaaaaacaagcagaccaaccagggaggcccgggagaacagaggcgagagcggcagcagcaccagcccaag

SEQ ID NO: 242867 - RNA, 52 nt, Homo sapiens
ccacggaaaggcagcaggcggaggccacaggggcaagacgccaagagaaaag

SEQ ID NO: 242868 - RNA, 115 nt, Homo sapiens
agacggcgggggcacgacagcgcaaggaggccgcacccaaggccgcagacaaggaacgcggagcgaagagagaggggccaaccggaggggcagcaggaggcggagccgcggaccc

SEQ ID NO: 242869 - RNA, 73 nt, Homo sapiens
ccaccaagccacgcacaacccagccaaaccaaacagaagccaaagagaccgagagccaaacacacaggaacgc

SEQ ID NO: 242870 - RNA, 77 nt, Homo sapiens
caggcagcgcaggaacccgaggcgaagagcgccaccaaggaagaagagcagacaagagccagagccgccagccccaa

SEQ ID NO: 242871 - RNA, 72 nt, Homo sapiens
gcagaacgaagcagacgccaacacagccgccagggaacacaccacacagagggaaagcacgaagggagccca

SEQ ID NO: 242872 - RNA, 83 nt, Homo sapiens
aaaccacaggcggagcaggggaagcagacggcgcccgcccaggccgcccggacggggcggcgccgaaaagcgaaaagaaacaa

SEQ ID NO: 242873 - RNA, 73 nt, Homo sapiens
ggagaggagcggcggaagaggggaacccagggcgagaggagcggaaaacgccagcggacaaaagggacgcgcg

SEQ ID NO: 242874 - RNA, 77 nt, Homo sapiens
cagacacagacgagcaggggaagggcgcaagggaacacaaccccaccgagcccagggccagaagagcgcaaccaaga

SEQ ID NO: 242875 - RNA, 43 nt, Homo sapiens
ggcgcacaccacggcccgggcaaacggaggaccgaagcaagag

SEQ ID NO: 242876 - RNA, 76 nt, Homo sapiens
cggcggaccaagccgcgggagcgccacagaccgggccaaacaacccaggaggaagagacacgcggagggaggaccc

SEQ ID NO: 242877 - RNA, 69 nt, Homo sapiens
aaggaggcagcggcggggcccgggacgaggcggacggggaaaacaacccgaacaggaaacgggcacaaa

SEQ ID NO: 242878 - RNA, 97 nt, Homo sapiens
acagggggcccaaacgggagacaacccccgaaggaggggaaaaaagcagacagacaacaaaaaagaccacaggccaagcgagagagagcacggcaca

SEQ ID NO: 242879 - RNA, 72 nt, Homo sapiens
ggagagaagacacacaggccacagcggggccacgcggccagaggcagggccgcgcgaagcggcccccgaggc

SEQ ID NO: 242880 - RNA, 58 nt, Homo sapiens
cgccccaacccacgagaggacagcccaggcaaacaaaaagcgacagagaaaacagagc

SEQ ID NO: 242881 - RNA, 75 nt, Homo sapiens
aaggacacagaaaggacaagaaacaccaacgagacacagccgggcaagagaagaaacgcaggcagggggcaacaa

SEQ ID NO: 242882 - RNA, 68 nt, Homo sapiens
acagaacgggaagaaagccaaacagacaggagacaaagggccgccgcaggcagccccgggccggggca

SEQ ID NO: 242883 - RNA, 65 nt, Homo sapiens
accagagccgcacccgccccccgagcgggaagaagccgcagcaagccgcagcggcgcgcaccggg

SEQ ID NO: 242884 - RNA, 76 nt, Homo sapiens
ggacaaacagaagccccgcgggcgccagaaaaccagaagacagcaagcagaaaaaacagcaaaccaaccagcacag

SEQ ID NO: 242885 - RNA, 128 nt, Homo sapiens
agagaggcaccgggacggaccgagaccggaccgagagcggaccgagagcgcgaaacgcacgagaagaggcccaaagagggcagcgggcgcccagacccgggagggagacggaggccgcaccacaagca

SEQ ID NO: 242886 - RNA, 55 nt, Homo sapiens
gccgagcgaacgcgcaacagggccgcacgcaaggaccgggggacacccgacagcc

SEQ ID NO: 242887 - RNA, 72 nt, Homo sapiens
aaaccaaagaagagcacaagccaacagagaaaccccccccaggaggcaggcagacgaagagaggaaacaccc

SEQ ID NO: 242888 - RNA, 73 nt, Homo sapiens
aagaccaacacgaaaccagcccagagaaacaaagcaggccaggaggaccagaaaacagcagaaagaccagcaa

SEQ ID NO: 242889 - RNA, 65 nt, Homo sapiens
gcaacacaacaggaggcggaggcgaaagcggaacgaggaaagccacagagccaagcaccgcacgg

SEQ ID NO: 242890 - RNA, 75 nt, Homo sapiens
ggggaagcaaaagaaaaggcaagacaaccacaggcagagaggagaggagccaagcccaacgggacgggaaaacgg

SEQ ID NO: 242891 - RNA, 61 nt, Homo sapiens
gaaggaccggaccggagaacaccgcgcgggaagaagcagaaagcgaagcagaagccgagaa

SEQ ID NO: 242892 - RNA, 70 nt, Homo sapiens
ggccgccggccaccgcgcacccacgaacgcccaccccccgaacccagccgcaccgcgagaagaagaaaag

SEQ ID NO: 242893 - RNA, 81 nt, Homo sapiens
accagagggcagcagagaaggcacaggcccgggaggagaagcaccagaagcagaggagcgagccgggcagacccgaaaagc

SEQ ID NO: 242894 - RNA, 70 nt, Homo sapiens
gccggccaaaccgaacacaccaagggacagccgccggggggggaaaaagggaccagggcgcgagccagaa

SEQ ID NO: 242895 - RNA, 65 nt, Homo sapiens
acgggcgaagcgacgagccgcgaggagacagcaaggccacgggacgggaaccgaagcgaccgggc

SEQ ID NO: 242896 - RNA, 86 nt, Homo sapiens
aaaaggggcacagccgagagaagacggaggacgagcgcggggcggcaccggaggaggagaaccgagcccaacagcaggggggaaca

SEQ ID NO: 242897 - RNA, 57 nt, Homo sapiens
ccagaagggggccacgaccaagaagaagccgcggacccccgacagccaagcaccgaa

SEQ ID NO: 242898 - RNA, 77 nt, Homo sapiens
gcaacgccaccagaggaaggcaaggaggggcaggagcacacccccacaggaccccccacagaaggcccggcaggcac

SEQ ID NO: 242899 - RNA, 80 nt, Homo sapiens
ggcgggagagccccgcagaagacgccgacgaggcaccggagacgcgggcagaaaaaggaaaggaaggcggcgggggagca

SEQ ID NO: 242900 - RNA, 82 nt, Homo sapiens
agccacaccacccagacggggaaagggggaaccagagggccacggccgacggcacggcggaaaccacaggggggaagggcga

SEQ ID NO: 242901 - RNA, 79 nt, Homo sapiens
acaaaaaacgacaaggacagagaaagagaaccgaaagaagagaaaagaggaagaaaagaagacggagcgccagccgcca

SEQ ID NO: 242902 - RNA, 74 nt, Homo sapiens
cccagcccccagaaaggaggacaacgggacccagaagaggaggagaggagagacccagagccgacagaagaaga

SEQ ID NO: 242903 - RNA, 85 nt, Homo sapiens
cggagccccccgcagcgaccggaagacgaggcggcgggggacaagcggcgccccagagcggacgaggaccgcacaggacgagcga

SEQ ID NO: 242904 - RNA, 87 nt, Homo sapiens
accgggaccccccgcggggacccggaacggccgacgaggaacagcagccgcaccaagggcaaaaagggaaaggaagagaagcaaaag

SEQ ID NO: 242905 - RNA, 55 nt, Homo sapiens
accgcacggcggagcccgcacgcggcgggcaggggaagaggagccgaaggagacg

SEQ ID NO: 242906 - RNA, 72 nt, Homo sapiens
gaagaccaccggaaaaccaagcaggaccaggagcgcagagggccggagacaggaccagaaggcagagacaca

SEQ ID NO: 242907 - RNA, 65 nt, Homo sapiens
cgacaaagggaaccacgacagacacaaggagggagaacagcacaagggacccccgcagccgaagc

SEQ ID NO: 242908 - RNA, 59 nt, Homo sapiens
aaacaaaaggacggggaccaaaaagggaaaagaggagaggcaggaccggaaaacagcaa

SEQ ID NO: 242909 - RNA, 41 nt, Homo sapiens
cccacggaagccagaaagaacgccaaaagacgaacacaaag

SEQ ID NO: 242910 - RNA, 109 nt, Homo sapiens
cgggcggggaggaacaagaaaaccggcccgaggggacgggggaacccggggccagaggaaaaacagccgagaaggaagcgcagaaggcaagccgcgcaccggcagcaaa

SEQ ID NO: 242911 - RNA, 68 nt, Homo sapiens
ccccagcaaaggggccacagagacgacgagccagagaggcaccaacacaagagaccaccccacacaac

SEQ ID NO: 242912 - RNA, 76 nt, Homo sapiens
gccacagcgacccacaaagaccgggcaggccagacgaccgcagggaaaacccacaagccgcaaggagcaaagaaga

SEQ ID NO: 242913 - RNA, 65 nt, Homo sapiens
accacaaaggcccacaacagcgccgcaaggcacagccagcccgccagggacacacagacgccaca

SEQ ID NO: 242914 - RNA, 74 nt, Homo sapiens
cgacaggccaccaacacacggaccgaaaaacccgaagcggcccacagacaggacagcgcagaagaggcacagcg

SEQ ID NO: 242915 - RNA, 73 nt, Homo sapiens
gcgccaggcccagacgccaacgcaggagcacccagggccgcggaaaaaaagcgcagaaaaggcacagaaacgg

SEQ ID NO: 242916 - RNA, 82 nt, Homo sapiens
gcggcggcacaagcacacaagccagcgcgccgaaggagaaaggggccacagaggccacgagcccgagaaaagcacagcaccc

SEQ ID NO: 242917 - RNA, 71 nt, Homo sapiens
aaggaggagccagaggcaacaaggcggacaagagaagccgccagaccggggcgagacacccaccaagaaca

SEQ ID NO: 242918 - RNA, 75 nt, Homo sapiens
gggagaacaaagcgaggccagagaaagagaagcggcacccccaggaagcgcgcagacagagacccaccaaggggg

SEQ ID NO: 242919 - RNA, 74 nt, Homo sapiens
ggaccggcccgaggaccagacgaggggcccagccgccgaggccagacaggaaacggagagagaaaaggagaagg

SEQ ID NO: 242920 - RNA, 66 nt, Homo sapiens
gcgcggacaagacggggccacggcggggcacaggcccaagagcagaaaaccaaggagcaggccccg

SEQ ID NO: 242921 - RNA, 82 nt, Homo sapiens
gcagcagcagagccgcgcagccaggccccaacaaggcgagaaccgaagggaggagacgagcaggcgagcgggcccgggcgca

SEQ ID NO: 242922 - RNA, 79 nt, Homo sapiens
ggaaagacgacagcaacccgaagacagggaaaaggaccaacacgagaaccacccgccggaggagaagaacaagacagaa

SEQ ID NO: 242923 - RNA, 52 nt, Homo sapiens
ggcagagcaccaaacccgagggacaggaccaaagaagaaaccaagaaggacg

SEQ ID NO: 242924 - RNA, 75 nt, Homo sapiens
gaacgcgcaacagggccgcacgcaaggaaaggccagcgccggagcgggggggagacaaagcaaagaagcagccca

SEQ ID NO: 242925 - RNA, 75 nt, Homo sapiens
cgcgcccgcgcggcgcggggaccgcggcccgggccccagggcagccaaccccgcggcaggcacggccaccggaac

SEQ ID NO: 242926 - RNA, 72 nt, Homo sapiens
agagagcgcgggacggcacaggcccggggaggaaaaagcggccaacagggggacgggaaagacaccacccag

SEQ ID NO: 242927 - RNA, 75 nt, Homo sapiens
cacacagacagccgacaaacacaaagcaaccaccaaaagaagcggagcaggcaacaggcagcgcagcaggaaggc

SEQ ID NO: 242928 - RNA, 65 nt, Homo sapiens
cagaggcccccgacggagacaaggacgggccaaccgccccccagcagcaggcacgggcgaacccc

SEQ ID NO: 242929 - RNA, 65 nt, Homo sapiens
aagacgccaagaccacagaacaccgagaaggcagggaacagggcagcaacccgcgggccccgacc

SEQ ID NO: 242930 - RNA, 66 nt, Homo sapiens
gaaggaaaagcacgcccaggccaaagagcacgaggagaaggaaacgaggcagaaccgagccaagaa

SEQ ID NO: 242931 - RNA, 84 nt, Homo sapiens
acaggcggagccaccacgccggcccaccaaacagaaacgagggagggccaccacgggccggacgaggacaaaggaacagcacag

SEQ ID NO: 242932 - RNA, 56 nt, Homo sapiens
gaaagcacagcagaaacacaaagcagcccaaccaaagggcggaggcaaggggacca

SEQ ID NO: 242933 - RNA, 87 nt, Homo sapiens
ccgggcaagcgcgcccgccgggaaaccgcgggcgccgggcgaagcccgggcagggcgggaaggaaaggcaagcggacgggcgcaaac

SEQ ID NO: 242934 - RNA, 74 nt, Homo sapiens
agccagccaccaggggagagggggaaagcaggggagaaaagaaaagaaagacgggaaagaagcgcaaagcagag

SEQ ID NO: 242935 - RNA, 72 nt, Homo sapiens
cgcaacaaaagcggaacacacgcaacggcacagacgcaggacacccccggcaccgaggaaaacaagcccaag

SEQ ID NO: 242936 - RNA, 87 nt, Homo sapiens
gcacagacaccggcgaggggagaggagaaggcagagcccccccaggcagaagcccgagcgggaaccagcgaagccagggcgcagaca

SEQ ID NO: 242937 - RNA, 78 nt, Homo sapiens
agacgcgaccgggcaccggcggggacagaaagcaggacccgccagcggaggagaggcgcccacagcagcgccgacgca

SEQ ID NO: 242938 - RNA, 64 nt, Homo sapiens
cccgcccgcccggggcgcaggggaaaaagcggggaaggggggcaaaaaaaagaagcaagcgaag

SEQ ID NO: 242939 - RNA, 83 nt, Homo sapiens
cacgacggcgacggcacaagaagcgggccgcagccggccgcagcgagagcgaggaggagcgcggggaggcgcagaagaagcac

SEQ ID NO: 242940 - RNA, 100 nt, Homo sapiens
caaagcccggcgagcaagggcaaggacacggggaaaagacagacagggcggcgacggcggcgcgaggaccgaccgggcccgcggacgaagaaggcacccc

SEQ ID NO: 242941 - RNA, 75 nt, Homo sapiens
ccacggcgggaagaagcaaacgaagggcaagaacaaaaaaaacccgagaggagcaggagcaaccgacaggcgggc

SEQ ID NO: 242942 - RNA, 78 nt, Homo sapiens
gccagcccaccagcacaagcaggggagaagaacaggggacgggggaccaaccgggcgcccgcggagaccacaacaaca

SEQ ID NO: 242943 - RNA, 57 nt, Homo sapiens
accaaacacccagaacaacaaagaggacacgcccaccaagaaagaaccggaaagggg

SEQ ID NO: 242944 - RNA, 81 nt, Homo sapiens
cagcgaagcggaggcggccgcgccgagaaaggggagcaagaagaaagagcagggaggagggagcgacaggaagaaagaaac

SEQ ID NO: 242945 - RNA, 67 nt, Homo sapiens
agacccggggacaggacacaccaggaccggggagaacaaaaagaggcacagacaagaggagcaccgg

SEQ ID NO: 242946 - RNA, 88 nt, Homo sapiens
agacacaccaggccccccgccaggacacacgcagcgggagggcacgaagcccccggcaaaggggagcgaacaaggagcggggaggaga

SEQ ID NO: 242947 - RNA, 82 nt, Homo sapiens
cggaacgaaccagagagagcccaaaagcaggcaacggccagacacagggaaagcggagggagagaacaaggagcaggccaac

SEQ ID NO: 242948 - RNA, 58 nt, Homo sapiens
cagcgccgagggaaacccggagaccaaaccgggcggagaacggaaaagcaccaggaag

SEQ ID NO: 242949 - RNA, 79 nt, Homo sapiens
accaggccacggcgccgaccgggagaacgagaagacaaggccccagggaagaagaagacggcacgggacccccagcaca

SEQ ID NO: 242950 - RNA, 68 nt, Homo sapiens
ccgaacaaaaagaagaaacacgacaagcaaggagaaaggaggcgggaagaaaaacagaaaaacggagg

SEQ ID NO: 242951 - RNA, 79 nt, Homo sapiens
cggagcgcgcacacgcggcgccgacccccacgagcccagccaccgaggaggagacggagccacggcgcccaggcggagg

SEQ ID NO: 242952 - RNA, 60 nt, Homo sapiens
cgagggcggcggaaaaagccgccacacgccaaaggccgagacgcaccagagccggaccgg

SEQ ID NO: 242953 - RNA, 41 nt, Homo sapiens
ccggaccggcccggcgagaggaacaaggcggagaagcgacc

SEQ ID NO: 242954 - RNA, 58 nt, Homo sapiens
accggaggaagcggcgcgagcgccccgccacgcccgggagaaaagaagcagcccacga

SEQ ID NO: 242955 - RNA, 82 nt, Homo sapiens
caggagggccgcaagacccaagaagaagaaggcgaaggaccccaacggggaggccaacggaagaagccgccgacggcccgca

SEQ ID NO: 242956 - RNA, 69 nt, Homo sapiens
ccagagaagagcgaaagggacgcaaggaacaaaaggaaacccaccaagagaaacaggcaggccagaaag

SEQ ID NO: 242957 - RNA, 81 nt, Homo sapiens
ccacaggagaggcccaggccgaccggcgcgcggagcggacaaaacagggcgacgcaacagcacgaggccccgacaggcggc

SEQ ID NO: 242958 - RNA, 67 nt, Homo sapiens
cggaagcaggaaggccaaccaacagccacacacgacccaacggggcagggccaaacagccgagagca

SEQ ID NO: 242959 - RNA, 77 nt, Homo sapiens
agagcacacgggccaggggagagagaagaaccgagcaggacgaaaggaacccgacaacccagaaaagaaaaggccag

SEQ ID NO: 242960 - RNA, 56 nt, Homo sapiens
cggaagcgcagggagaaggaagaggggaaaaggcgagaacgcggacaagcaaacaa

SEQ ID NO: 242961 - RNA, 81 nt, Homo sapiens
gccggacggcaccccccgcaaggcgggggccaccaaaaaaggggaaaccagcgcaccaggaggcgcagggaaacggaacca

SEQ ID NO: 242962 - RNA, 74 nt, Homo sapiens
gcggcggggagcgccgcggcccgggacgaggacagggcagaccgccagcagcacagcaagccacagagagggcc

SEQ ID NO: 242963 - RNA, 70 nt, Homo sapiens
aaacgaggccccgagccagccccgacagcgggaaccgccgcaaacagaccccaaggcgaagcgacaacac

SEQ ID NO: 242964 - RNA, 61 nt, Homo sapiens
aaacaaacagagaacggcgggaagcgaagaagcggcagaagagcccagaagaaaagaaacc

SEQ ID NO: 242965 - RNA, 72 nt, Homo sapiens
gacagggacagcaacgcaccggacccccaaagaagcaaagagggccgaacaggaagaaaagaacagaaggga

SEQ ID NO: 242966 - RNA, 74 nt, Homo sapiens
agagaaccacgagccacaggcaaggcccaggaacagaaaacggcaaaccgccaacaagacccacccgaagaaaa

SEQ ID NO: 242967 - RNA, 37 nt, Homo sapiens
gaagacagcgcagcccgaggagagaaggcgaggaagc

SEQ ID NO: 242968 - RNA, 77 nt, Homo sapiens
acggagggaccgcagagagaggcgcagaaggaccgggagcacagccgccgagagagccaggaggggccagagagaaa

SEQ ID NO: 242969 - RNA, 71 nt, Homo sapiens
agcgcagaccgaggaaaaggagagaggcgggacaagggcgcaccggggcgcagcgagggaggacaacgggg

SEQ ID NO: 242970 - RNA, 61 nt, Homo sapiens
ccgcccgcggcaggggaagcccggaagcacgcgggccaggaagggccccacaccaaaccgc

SEQ ID NO: 242971 - RNA, 75 nt, Homo sapiens
gggcccccacaccgccaaaacgcccccagcacccagacccaggaacaggaaaaaccgcgacaagacaggaccaca

SEQ ID NO: 242972 - RNA, 87 nt, Homo sapiens
cgcaaacaagccaacccaggaggaaaaacgaagagaagcgaaggacgacagccaggggaggacaccacggcaccggagcacgaagag

SEQ ID NO: 242973 - RNA, 65 nt, Homo sapiens
acgcagggcgcccccggcagaacaagaagggcaaccaggggggaaggagggagcggagaacgcga

SEQ ID NO: 242974 - RNA, 74 nt, Homo sapiens
cgggagccacccacccccgggcaaggacccgccagaccagagaaggaccaagaagcaagagccagccagagaac

SEQ ID NO: 242975 - RNA, 50 nt, Homo sapiens
cgcacggcaggacgaggcacagaaggccgggaccccaccagcgccggcag

SEQ ID NO: 242976 - RNA, 68 nt, Homo sapiens
agggaccagcgacgcaccccccccagacgaggaacgagcagacgacaacggaacaaagaagcggacca

SEQ ID NO: 242977 - RNA, 61 nt, Homo sapiens
caagacaccgcgaaagagagaagaagaaggaggccgcggccagaaacccaagaaaaagcga

SEQ ID NO: 242978 - RNA, 83 nt, Homo sapiens
agaaaggagggcggcgcgccgagcgagccaggacaaaaccaggcagaaccaacacgaacccaagcacaaacaagaaaacgagc

SEQ ID NO: 242979 - RNA, 54 nt, Homo sapiens
gcccagaacagaagaaacagccaaccacgaagcagagaggagaagaaaagcagg

SEQ ID NO: 242980 - RNA, 54 nt, Homo sapiens
cgcgccgggagagaaggaaacaaggaccagagaggagaagaagaggcagggcca

SEQ ID NO: 242981 - RNA, 75 nt, Homo sapiens
gaacaaggcgcgccagggcacagggagcagccgaagagcaaagaccacccaagaagaccaaggcccaaaaggacc

SEQ ID NO: 242982 - RNA, 78 nt, Homo sapiens
ccgagacaccagagaagaccgggcccaggccagcaggcggagcacgcagggagccgccaccaaaagcagacggaaaac

SEQ ID NO: 242983 - RNA, 77 nt, Homo sapiens
gagccaggagcgcacacacgacaggagaaaggaggaaagcgcacggcagcagcaaaaccacagagaaacggcccaag

SEQ ID NO: 242984 - RNA, 44 nt, Homo sapiens
aggacgccccacacacggcaccggagaaacgccaggaccgagac

SEQ ID NO: 242985 - RNA, 89 nt, Homo sapiens
cagaaagccaggaccaagagacaggcagccaccagggggacaaacgccagagaggggggggaaaccagaaccgccggagaacagaggca

SEQ ID NO: 242986 - RNA, 33 nt, Homo sapiens
gaaaggcggagaagagcagcaaggcagcagccg

SEQ ID NO: 242987 - RNA, 74 nt, Homo sapiens
ccaacagcccggaagaggaccccagacggacgcggcccccacgaaccgcgaccgcaagccgccacccgagaccg

SEQ ID NO: 242988 - RNA, 70 nt, Homo sapiens
gcccagacggccaccggcgggaggaacaaaagacccacagaggaagcccaagaggaacagggcagcaggg

SEQ ID NO: 242989 - RNA, 81 nt, Homo sapiens
ggcaacccacacaagcgaaggcgcgcaccggaagcaccagcgaggaagccagacaacacagggacacaacaaacacaaccg

SEQ ID NO: 242990 - RNA, 72 nt, Homo sapiens
ccgagcagagaagagaaagaaggaagagcggaaaacaaaagggaaacagaaaggcacgagcaccaggacacg

SEQ ID NO: 242991 - RNA, 76 nt, Homo sapiens
aggggcggacgcggccggcagcccgaggccggccgccgcgcccccaggcccggaacccaccccagacggcacaggg

SEQ ID NO: 242992 - RNA, 76 nt, Homo sapiens
acccggagcccagggaagcagccgaccagccgcggagccgggggcaggcgcgcccccacccggggccgagaaccac

SEQ ID NO: 242993 - RNA, 77 nt, Homo sapiens
cgcagaggcgcggagcgggcagccgccgccaccccgcggccgcacccccgccccagggccagccgcccaccccagcc

SEQ ID NO: 242994 - RNA, 77 nt, Homo sapiens
aaggagacgcccgcccgcgccaagacagggaggcacccgagcagagcacagaagaagcggcgggagaccaggagcac

SEQ ID NO: 242995 - RNA, 84 nt, Homo sapiens
cagcgaggcccgcggagaccagggcccagcaagcaaccacgagagcacaaggacaaccaacaacccccagaacccgaaaccggg

SEQ ID NO: 242996 - RNA, 60 nt, Homo sapiens
agacgacccccaaaaaggaaacaaggccgaagcgagggcagaaagggcccagccggcaga

SEQ ID NO: 242997 - RNA, 66 nt, Homo sapiens
aagggggaacaggcggagccaccgcgcccagccccccacaaggcagggaccaggaggagaagcaac

SEQ ID NO: 242998 - RNA, 74 nt, Homo sapiens
aagaacagaaaacgcaaggagaaacccaagagcagcggcagagcagcaaaaaggagggagcagggacacacgaa

SEQ ID NO: 242999 - RNA, 106 nt, Homo sapiens
ccgcgcaccgacccgacgcgccggcccacgcgcggccaagccggcccgcggggcggaggcacgggcccacaacggaaccaacgccagcaagaagagcgcagccgag

SEQ ID NO: 243000 - RNA, 72 nt, Homo sapiens
gaccaacggggaaccccggacagcaaccggaaagggccaaccggcgcacagggagcagaagggacgagaaaa

SEQ ID NO: 243001 - RNA, 77 nt, Homo sapiens
ccgcgcggcgagagaggagaaagcacacccaaaggaggcagcacggcaggagacgaggagaggacagcaggacaccc

SEQ ID NO: 243002 - RNA, 73 nt, Homo sapiens
gccaacccccccacgcgcacgccgggggcgaggagacaaaaaagcccaagggaagggcccagcaccggcaggg

SEQ ID NO: 243003 - RNA, 58 nt, Homo sapiens
gaggaccaccacagaaggaagaagacggggacccacggagaccacacaccaaggagga

SEQ ID NO: 243004 - RNA, 84 nt, Homo sapiens
cgcggacccaggcgcggaggcgaggccagcagacagaagcgaaggggacagggggagaaccgccagggaaacccgggggacaga

SEQ ID NO: 243005 - RNA, 83 nt, Homo sapiens
gcgaggccgagcccgcgcagaagaagaggaggaggccaggcaggcaaaaggagcaggccgagcagcagcgcggaagcgcccgg

SEQ ID NO: 243006 - RNA, 72 nt, Homo sapiens
ccgcccccggccgagcgacgagacggccggcaacaagcgaggggggaggccaggcgcccagaacggccggaa

SEQ ID NO: 243007 - RNA, 78 nt, Homo sapiens
aacaaccccccggacccagagggcggaaccgacacggcagacagggccagccaccgcggcagcgcagcagcccggcca

SEQ ID NO: 243008 - RNA, 84 nt, Homo sapiens
acaccagcggcgcaggacgggcacagcagagaccaaaggcagggcaaggaaacggccacaaacgagccaacggaggcagccggc

SEQ ID NO: 243009 - RNA, 72 nt, Homo sapiens
acacgggagcggggggggcccggaaccgagccccgacaggcagacgaacggcaccaggacaagcgagggaga

SEQ ID NO: 243010 - RNA, 79 nt, Homo sapiens
aaaaagcaaagaaacaaaagacaaccgcccagaaacggccaggacacggaaaccacagaaggacaccagcccaaacacc

SEQ ID NO: 243011 - RNA, 73 nt, Homo sapiens
cagggaagcagccgaccagccgcggagccgggggcagggaaagaaaagaggcccggaagagagccaccacgac

SEQ ID NO: 243012 - RNA, 82 nt, Homo sapiens
ccgaggggccgcccagaccggggcgcgggcccaggcgccggaagagccaccagaaggggaaggaacaaggggggcggaaacg

SEQ ID NO: 243013 - RNA, 80 nt, Homo sapiens
agagacagccggacgagcgcgaggaggggaccccaccagacaccaggccgcaccgcgaggaacccgagcccaccggcagc

SEQ ID NO: 243014 - RNA, 74 nt, Homo sapiens
aggccgcgaagaggacaggaaaagcacaagccgagccgcagcggcccaccccgcacaaccaccgacagcagcca

SEQ ID NO: 243015 - RNA, 67 nt, Homo sapiens
ggccccgagcagggggggggggaagccgcagcggaaagcaggagcacaggcagagaacaacccggcc

SEQ ID NO: 243016 - RNA, 73 nt, Homo sapiens
aagaacaggagcaacccaggacaccaccagcgcccaccccagaacaagcgggagccggcaggaaagcagcaga

SEQ ID NO: 243017 - RNA, 77 nt, Homo sapiens
ccaccgccggccaggggcggaaaccggacccccgcgaaccccaacggccccgccgcgaaccacccagccgcgcggca

SEQ ID NO: 243018 - RNA, 78 nt, Homo sapiens
ccccggggagccagcgagcccccccgacacggccaagacaagggaggcgaggacggacaaaaggaaacggacgggagg

SEQ ID NO: 243019 - RNA, 65 nt, Homo sapiens
gacaggggaagaaaaacggccggacgaaggacgaaggggagcaaacaggcccagaaagcgggcac

SEQ ID NO: 243020 - RNA, 75 nt, Homo sapiens
ggagggggcgcggggaacgggagcggagagggacacacagcaacaaaaggcacaaccagaccccccccaaaagca

SEQ ID NO: 243021 - RNA, 74 nt, Homo sapiens
aacgcccgacaccccacaaccacagggaggagagcccagaccagggagccagccggaagagccgccggcccagg

SEQ ID NO: 243022 - RNA, 82 nt, Homo sapiens
ggaccaagggaaggagcaacgccacaggggcaccagacgaggggacaacgaaggaggcaagcaacaaagggacaaaaacgac

SEQ ID NO: 243023 - RNA, 67 nt, Homo sapiens
gaaaagacaagggggcaaagaacaccagaagcagccgaaacgaaccaagaaccgaaggaaccaagag

SEQ ID NO: 243024 - RNA, 81 nt, Homo sapiens
ccgcgagaaggaaggcgagccagggcaggcccaccgaagacagaaaaaacggggggaccacagaaccccaaaacgcaagac

SEQ ID NO: 243025 - RNA, 73 nt, Homo sapiens
ggaaacgaagcgcacgaaacaccaaggaggaaccgacgggaggcccagagcagaacgccgcgaaaaaagaagg

SEQ ID NO: 243026 - RNA, 78 nt, Homo sapiens
cccagcaccccacgcccggccgacaagcacgcaaggggagaggcaccagcaacagaccaaccgcagcaagcacagaga

SEQ ID NO: 243027 - RNA, 36 nt, Homo sapiens
gcaaggggccgagcaaagaagaagcccaggacaggg

SEQ ID NO: 243028 - RNA, 68 nt, Homo sapiens
gacgaggacacgcagccggccgaggaccccccaggcaaggacccccgcccagccgcccagggcgagaa

SEQ ID NO: 243029 - RNA, 72 nt, Homo sapiens
caagaggccggcggggcgacagcaagccccagccaagacccaccaggcaggggaagaagacaccacaaacaa

SEQ ID NO: 243030 - RNA, 85 nt, Homo sapiens
gagcggcgcagccggagggggccggaggagccgggggggcgagcccgccgagagcgccaaggaggagacaacgggggaagaagaa

SEQ ID NO: 243031 - RNA, 87 nt, Homo sapiens
gggggcagggacaagggaaagaaacggcggaaaaacagaggcacggacccaaaagaacaacgaacaccagcgggaggaagaggccag

SEQ ID NO: 243032 - RNA, 59 nt, Homo sapiens
gagaagccaggagccaccaacaccaaaaagaacaacggagggaagaccggcccccgaac

SEQ ID NO: 243033 - RNA, 69 nt, Homo sapiens
ggaggaagacccaaaagaccagcccaggcccacaggggcccccccacgaaaaagacacaagcacacccc

SEQ ID NO: 243034 - RNA, 80 nt, Homo sapiens
gagggaagaagccccagcaagaaagcagaagagcgccagcacacacaagcaggaccaagaaaggcccagggaccaaagcc

SEQ ID NO: 243035 - RNA, 80 nt, Homo sapiens
gacgccggaacacccggaagccgagaaaggaagggaccacagaccagcacgccggcgccacgaaccgagcgacaggacgg

SEQ ID NO: 243036 - RNA, 122 nt, Homo sapiens
acggccagccaacaacaagaaaagcgcgaaagggaagaggagagccagaagccaagaagacagaggagcaagaggggggggcccccccgaagaaaggaaccggggagcggcgaaaaaaaagg

SEQ ID NO: 243037 - RNA, 76 nt, Homo sapiens
ccccggcgccgcgccggcggcggagaaccagggcacagcgcagcggagcgaggaaagcaggcgggcccagaggcgc

SEQ ID NO: 243038 - RNA, 99 nt, Homo sapiens
gcaccagacaggcagcaggagacaaggaaccacgaccgacaggcggacaagccccaaggccagcaaaccgagccgaagaacacaacgggccaaagacga

SEQ ID NO: 243039 - RNA, 71 nt, Homo sapiens
cagaacgaagaaccaccgagaaagaggaggacacgggaggagacgaagcaagcacacggaggcaccaacca

SEQ ID NO: 243040 - RNA, 113 nt, Homo sapiens
cgggggcagggaggaggcagcaggaccagacacgaggacgggcaggcccagcagacgaaaaagccgcacaaccacagcacaggcagaaaagcggccacccacaaagaggggcg

SEQ ID NO: 243041 - RNA, 79 nt, Homo sapiens
cagccgacccgccaccaaggaggaaaacacgcccgccgacagaaacacgcaaagaacagcgaccagggggacaggaaca

SEQ ID NO: 243042 - RNA, 74 nt, Homo sapiens
cgacaacaggaggccggaagacccaaagcgagggacggcaaacgcggaccggaccagcaaccgcacacacacca

SEQ ID NO: 243043 - RNA, 128 nt, Homo sapiens
agagacgagcgggggacggcacgggccgcagaagacagggcggcgggccggacgacaaacaaggcgagaccaccagaaggaggccggggagaaccacgggacagcaccagaacaggggcgggggaggc

SEQ ID NO: 243044 - RNA, 69 nt, Homo sapiens
cccccgagaaccgcgccaccagagacggcggggccggggagcccgggccagaccccccagacccagccc

SEQ ID NO: 243045 - RNA, 69 nt, Homo sapiens
caaaggacgaagaagagccgaggaaggggacaagcgagggcacggccaggggggacggggcacagggac

SEQ ID NO: 243046 - RNA, 82 nt, Homo sapiens
ccccggggccgcagcgcggagagaagagcaggagaagggccccagcgcaaagcccaaggccacaccaggacccagcacgccc

SEQ ID NO: 243047 - RNA, 88 nt, Homo sapiens
aaagaaaaaggaaaaaaagaaaaacaaagcacaccgggcccccaccagaaggggacagggaaccacgccaacggaagcagggcgcagg

SEQ ID NO: 243048 - RNA, 81 nt, Homo sapiens
cggagaagccgcggcggcagcacgacagcgccggcaacacgcggcacaagacgggggcagaagaaaaagcaggacaacagg

SEQ ID NO: 243049 - RNA, 71 nt, Homo sapiens
gaaaaggccgaagaaaccaaggaggacaggaagccccaacagaagagagaggccaaagggccaagcacacg

SEQ ID NO: 243050 - RNA, 70 nt, Homo sapiens
gcgaggcgccgcggaccagaggcgccgagcgaccagaaagaaacacggcgcaaacggccgacccgcggag

SEQ ID NO: 243051 - RNA, 71 nt, Homo sapiens
ggaagcgcagacccgcgaaaaaaaacagggcgaccagcggaagagcgcaacaagcgaaggacaagagaaaa

SEQ ID NO: 243052 - RNA, 112 nt, Homo sapiens
cacagcgggaaagaaagcagccacgagaagacgaaaaaaaagaaggaagagggcgggagccagagaccaaaaaaccgaagaaggagcccaaacaacccagaggcagggaagg

SEQ ID NO: 243053 - RNA, 60 nt, Homo sapiens
ccccgagaccgggaacaggagcagcaggaccgcagcaacaaggaacaaaagaagaagaac

SEQ ID NO: 243054 - RNA, 67 nt, Homo sapiens
caaaaaaacagaccaagggaaggcacggcaagcaagcacacagcccggccaccgacccccacgacgg

SEQ ID NO: 243055 - RNA, 81 nt, Homo sapiens
gcgcccgcaccccggggcccaggaagggcggcccagcggcggaggcggaccggggggcccgggcccgccagacccgcagac

SEQ ID NO: 243056 - RNA, 80 nt, Homo sapiens
ggcggcggggccgcagcccaaggaagggacgagccggggagccgggacgggcagggcgggaccacagggacccggccaag

SEQ ID NO: 243057 - RNA, 55 nt, Homo sapiens
cgggaaacgggagggaaccagcaacaagccgcggaggagaaagccgccagaagca

SEQ ID NO: 243058 - RNA, 79 nt, Homo sapiens
gcagcccaaggaacagaccgacccaaacccacgcgcggggaccccaggcggccccgcaccgcccacccagcggggcccc

SEQ ID NO: 243059 - RNA, 77 nt, Homo sapiens
cggcgcccccgcaagaggacggcgccggcagccggcacgaaagaacggaggaagcacaagggagagaaaacccaacc

SEQ ID NO: 243060 - RNA, 80 nt, Homo sapiens
acggcggcggggcggcggacgaccggagagccggcgaagggagggccgccccaaccgacgcaccagccggaggaggaggg

SEQ ID NO: 243061 - RNA, 63 nt, Homo sapiens
caccacaagagggccggaagccgccagaaccgggggaaacacaaccgccccgggaggagcgga

SEQ ID NO: 243062 - RNA, 85 nt, Homo sapiens
gccaacaagacgcacccgccaccgggaccgacgggcacgggggagagggggcacccaagccaagccagaaccaggcgggaacaga

SEQ ID NO: 243063 - RNA, 52 nt, Homo sapiens
gcaaacaagaggccaaccggcacaagacggcgaagacaaacacccacagagg

SEQ ID NO: 243064 - RNA, 77 nt, Homo sapiens
ccggacgggagacgccacaccgcaagcgcggagggcgaggaagcaggaccgagccgaggccggcagagcccgccccc

SEQ ID NO: 243065 - RNA, 64 nt, Homo sapiens
aagaggagaaggggaagacacacgacgagagcaagagcgaggaggagagcgaggaagaggaaga

SEQ ID NO: 243066 - RNA, 77 nt, Homo sapiens
ccaaccaccacggaacaccaggcagcaggaacaggacaagaagcgccaggcaaaaggaagaaaccagagacgaccac

SEQ ID NO: 243067 - RNA, 75 nt, Homo sapiens
cggcgagagccgcaccgccaacccccgagcaagacgggaccacacgaaggggcagaagagcacaagacggaagag

SEQ ID NO: 243068 - RNA, 80 nt, Homo sapiens
ccggagacaacggcgaagacacagggaaagcagcgaagaaccccaagaagaagcggaagaggagccgcggaaccaagaca

SEQ ID NO: 243069 - RNA, 77 nt, Homo sapiens
cggaccacaaaaaggacaccagcaagcgcaagaggaggccaccacacacgagcccgacgacagaaccccgaccagcc

SEQ ID NO: 243070 - RNA, 75 nt, Homo sapiens
ccaccgccggcgcgggaaacgggcgaagcgacgagccgcgaggagcacagaaccaggaagaaccccaacagccaa

SEQ ID NO: 243071 - RNA, 80 nt, Homo sapiens
ccaacacaaagcagggaggcagcgccgacaacaccgacacagaccaacaagccgagccaagaacagaggcgccggacccc

SEQ ID NO: 243072 - RNA, 80 nt, Homo sapiens
ggacacaaggaggcccaggacggaccagacacgcaagggaccgccagcccagggaaccaggaaagaccacagcaagacca

SEQ ID NO: 243073 - RNA, 67 nt, Homo sapiens
acacgcagaagcacggaggacaagcgcgaaccaagacaggaagcccacccaaagagagaaaagagag

SEQ ID NO: 243074 - RNA, 81 nt, Homo sapiens
ggcccgggaccacaggccccggcccagacgagagccgcggcagcccaagcgaacaccgaagggagagcaagccggcccggc

SEQ ID NO: 243075 - RNA, 79 nt, Homo sapiens
ccgcggaccgcgcgccacaacagcaaaagaaggccaagagccacagagcggaacgacagaccacacccagacaccaaaa

SEQ ID NO: 243076 - RNA, 65 nt, Homo sapiens
agcgcgcaccggagcgcagcggcccagcgcggagaggcgcagccggaccgagagggcaggccgcc

SEQ ID NO: 243077 - RNA, 41 nt, Homo sapiens
cacccgcccccccggccagggcccgcggagcagagaccaca

SEQ ID NO: 243078 - RNA, 75 nt, Homo sapiens
cgagcgcacgaggaggcgcgcagaaccagaccgggagcacgcacccacgaggaacgggaggcggacgccacccaa

SEQ ID NO: 243079 - RNA, 73 nt, Homo sapiens
agaagcagaaggccaccggaggcaaagcagacccggggaaaacaggacggcaaaagcagaccggaaaacccac

SEQ ID NO: 243080 - RNA, 63 nt, Homo sapiens
gcaggagaaggccggaggaagcagcccgcaggaaggggaagaaagaaaaccaaagagccgggg

SEQ ID NO: 243081 - RNA, 71 nt, Homo sapiens
gggaagcgcaaacgaacagagaaacaccaaccaaaagaccccaaaggccggcggaagaggaccaagaaggg

SEQ ID NO: 243082 - RNA, 73 nt, Homo sapiens
gcgcacggccagcgcagaccagaaaagacgagaaagcacaggggaggagagagaggaccaccaggcaaccaaa

SEQ ID NO: 243083 - RNA, 76 nt, Homo sapiens
aacaccagacaccaaggacagcccgcaagacaccaaaccacgcaagcgagaccaaaggaggacaaccccaggcgag

SEQ ID NO: 243084 - RNA, 91 nt, Homo sapiens
aacgccacaccgacccacaggagcgcccgcggaggagcgcccgggggggggcggaggacgccaccccgggcacccggccacacccccccgg

SEQ ID NO: 243085 - RNA, 85 nt, Homo sapiens
gagccggaggggagggggcgagccccgcgcagccgccggcgcgccgccaggaccagccaaagaagccaaagccccagacaaccac

SEQ ID NO: 243086 - RNA, 73 nt, Homo sapiens
aaaaagaaggacaacccaaccacaaagagagggagagccagagggaaggagagaaggagagagacccagccca

SEQ ID NO: 243087 - RNA, 56 nt, Homo sapiens
gggacgaggagaggaccaggaggaggaggcagagaggcaccagaaaaaaaaagaca

SEQ ID NO: 243088 - RNA, 76 nt, Homo sapiens
cacagcagcagcagcggcgccgcccgcagcccacagcccggccagaaggagaccagcgcccaggagagcagacgac

SEQ ID NO: 243089 - RNA, 36 nt, Homo sapiens
gcgaaaggcaagagggaaagccccgcacgcgaagac

SEQ ID NO: 243090 - RNA, 80 nt, Homo sapiens
gacagaggaaaagaccacaacaggccaaacaccagagcacccagaaggaacaaaagaagccaggacccagccgcaagcaa

SEQ ID NO: 243091 - RNA, 71 nt, Homo sapiens
gaacccgacacaagacgaaggagagcgaagcaagggaccgaagaagccaaagggaccaccacacgaaacca

SEQ ID NO: 243092 - RNA, 61 nt, Homo sapiens
agggagagaagccaagaaagacagccgcgccggcccggaagcggaggaaccacgggagggg

SEQ ID NO: 243093 - RNA, 58 nt, Homo sapiens
ggacgaagacaccgacgggggaaccgcccaaaagcccgccagaagaaggacgggagcc

SEQ ID NO: 243094 - RNA, 82 nt, Homo sapiens
gggaaccgcaagcggccaagcacaaagagcgccccacgagagaacggcacacgcgagcgagccgaagagagaaacccccaaa

SEQ ID NO: 243095 - RNA, 63 nt, Homo sapiens
ccccaggagaagagccagagcgggaggacgacgagagagggcacccgcacagcaccaagcacc

SEQ ID NO: 243096 - RNA, 78 nt, Homo sapiens
ggcaccccgggagccagacaaaccaaagaagacaagcgaagacgcagccggcaaggggcagacacccggcccagcccc

SEQ ID NO: 243097 - RNA, 68 nt, Homo sapiens
ccacgcgacaggagaagacaacgaagagaggaaagaagcggaaaggagggagcacacaacaaggagca

SEQ ID NO: 243098 - RNA, 73 nt, Homo sapiens
cccccagcgccacagaacaccgggacccacagccgcacagcacggacgacggaaccacccggcaccccaacca

SEQ ID NO: 243099 - RNA, 71 nt, Homo sapiens
gcccagccaccgccccccccacggaccgcggcaagcgggagcggacccacccaagccaccgaacccggccc

SEQ ID NO: 243100 - RNA, 80 nt, Homo sapiens
cacgacaccccacccagacgaagacagcccggacaccgacagcacagacagaacccgcaccagcgaaaggccacaccgac

SEQ ID NO: 243101 - RNA, 77 nt, Homo sapiens
ggggagaacgcagccaccccccacaagaacgaagccaggacaggcgggggcggcaacgaggagaggccccacaaacg

SEQ ID NO: 243102 - RNA, 81 nt, Homo sapiens
agacgccggaaagaaggcccccgcccgagagacaagagagacaccccaaccgacaaagagcaccagacagccgggaacgac

SEQ ID NO: 243103 - RNA, 77 nt, Homo sapiens
ggaagccagaaagacagagcaagagagcaagcagaccaacagaaaggccaaggaagcacgggaagaacagaaaagag

SEQ ID NO: 243104 - RNA, 64 nt, Homo sapiens
aaaaagagaggagcgaacgagacagaacaggaaaaaggcaggggagcacgccagacacccagaa

SEQ ID NO: 243105 - RNA, 70 nt, Homo sapiens
cgaaggggagaaaagggaaggccccaagccaaggaaggccaaagaaagacaagagcgagcacaccccccc

SEQ ID NO: 243106 - RNA, 70 nt, Homo sapiens
ccgggagccagaccggcaccgaagaccgaggcagcacggcaggagacgaggagaggacagcaggacaccc

SEQ ID NO: 243107 - RNA, 87 nt, Homo sapiens
cagaccaccagcgcggcagccacacagacgcaccgacacggcgacagagggccacaacgagaaagaccgacgaaaagaagaaagaac

SEQ ID NO: 243108 - RNA, 76 nt, Homo sapiens
ggaggaagacgaacgaacagccagaagaaaagggcagggggaccacggaccaggagagagaacccagagggagggg

SEQ ID NO: 243109 - RNA, 52 nt, Homo sapiens
ccagcggccgcgcacccccggccggaggcaccagcgccagaggaaaaagcgc

SEQ ID NO: 243110 - RNA, 67 nt, Homo sapiens
ccggaaaaacccagagcgccaaacccccaaggaaggaagcaagaagggaggaggacgaagaagcgcc

SEQ ID NO: 243111 - RNA, 75 nt, Homo sapiens
cccaccgcgggaggagacccagcggcgccgcggagggaccccaaggcacaggccagacgaaccccagaggcaacg

SEQ ID NO: 243112 - RNA, 73 nt, Homo sapiens
aagagagaaaaccacggacaagaaagcgccaaaaacaacaccaaaaagccgcagggaggcaagagcaagaaac

SEQ ID NO: 243113 - RNA, 79 nt, Homo sapiens
ccagggaccccaagcgacgcacccgaagagcaggggaacggcagaagggccggacagaacaacaagagcccagggggca

SEQ ID NO: 243114 - RNA, 70 nt, Homo sapiens
aggaccaagaaccagaacgaaaacaaacggaagagagggcagcaagaaagaacaagaaagcgaacggaaa

SEQ ID NO: 243115 - RNA, 82 nt, Homo sapiens
gccacgccaagcaaaccgggaaaggagaggacccggagccggaaccaaaagagaccggggacgcccagcaggggcgaaggag

SEQ ID NO: 243116 - RNA, 85 nt, Homo sapiens
gggaccaggcgaagcggccgagcaggcgagcgaacgacgaaaggagacacggcgcgccgcagcagggggaagaagagaaaacgag

SEQ ID NO: 243117 - RNA, 76 nt, Homo sapiens
gccgacccagcgcggcccgagaagcaaacaaccagcccgagcccccaaaccacagagaagaagaagggagggaacc

SEQ ID NO: 243118 - RNA, 74 nt, Homo sapiens
gcagagagaaagcccgagggacacacaaaggaaaacccgagacaagccccgcccgaggagagccagcacgcccg

SEQ ID NO: 243119 - RNA, 79 nt, Homo sapiens
caggagcagccacagagacaaaccaccaaagaaaggggaaccgcccaaaagcccgccagaagaaggacgggagccaaaa

SEQ ID NO: 243120 - RNA, 69 nt, Homo sapiens
cgaggaaaaccggcccacgaaaaaaggcccacaggaacaaccagaaaaggaggaacagacaaccgaaga

SEQ ID NO: 243121 - RNA, 85 nt, Homo sapiens
aggaagaggaggcggccagagaggaggagaggaaagggaagaggggggcgggccgagcacccgcaggccccgcagaggcgcccac

SEQ ID NO: 243122 - RNA, 69 nt, Homo sapiens
cagccccaccccgaaacgccccgaaaagacgggcaacagggacaggccggaagaccaccaagagggacc

SEQ ID NO: 243123 - RNA, 69 nt, Homo sapiens
accgaggggagaaaccaaaggcaaaagacacaaaggaagccacaagacaccaggaaagacaccgaggcc

SEQ ID NO: 243124 - RNA, 76 nt, Homo sapiens
cgacgcaacgcggagcgcaaggcgagggacgagaacgaggcaccggaaggcaaccaaccagccgccgaaacaccac

SEQ ID NO: 243125 - RNA, 85 nt, Homo sapiens
gggcgcaaacgcacacgacggccccgcccccggccagccaacggacagcggagcacgagagaaggagccaccgaggccacccgag

SEQ ID NO: 243126 - RNA, 79 nt, Homo sapiens
aagaccaagaggcagggcgcccccacgggaccggacagccggccgagacgagcccacacgggacaggaagggaaccgga

SEQ ID NO: 243127 - RNA, 83 nt, Homo sapiens
cgggcaggggcgcgccgccggagcacaccaggcacccaccacggggcacacgggccagaccaggagggccggggacccagcag

SEQ ID NO: 243128 - RNA, 70 nt, Homo sapiens
cgccacgcgcggaaggcagcgcccagcagcgcaggaaggaaccagaaaaaagaggaagcaagaccaccgg

SEQ ID NO: 243129 - RNA, 70 nt, Homo sapiens
agaaggcggcagaaaaaacccccagacaaaggcagggcgcgaccgcccagggagacggaacccacacaga

SEQ ID NO: 243130 - RNA, 76 nt, Homo sapiens
aggcacgggcagaacccaacagaagcgaagcaggaagacaagaagggagcgaggaaaaccgagccaaagcagagca

SEQ ID NO: 243131 - RNA, 69 nt, Homo sapiens
cgagagaaaccacaaaggaccgaagacaacgaggggcacgcgcccacccaggcgcagacgaccgcgagg

SEQ ID NO: 243132 - RNA, 76 nt, Homo sapiens
cccgaggaagcgcccccaaaccccaggaaagaggcccacacaccagagccggacgagcgggagaggacaccacaca

SEQ ID NO: 243133 - RNA, 84 nt, Homo sapiens
ccggaccgaggcacacggaggcccagagcacgacgagcgcggaggaccgggaggccccgggcgcgggggaagaaaacgccagag

SEQ ID NO: 243134 - RNA, 70 nt, Homo sapiens
ggaagagcaaagccgagacaccgcacccgaagagccggcacggagaaacaccccggcggaggcacccaac

SEQ ID NO: 243135 - RNA, 95 nt, Homo sapiens
gccaagcgcacacaaaagaggagaaaaccgggcgcagccgggggcacgcacaccccgggcaccggggcacgccgaaccaccaggccgcacaccgc

SEQ ID NO: 243136 - RNA, 58 nt, Homo sapiens
gccagggcacggacaacgcgcccaggggacacccagcaggccagggaagaggcagccc

SEQ ID NO: 243137 - RNA, 79 nt, Homo sapiens
ccacgcagaagcgcggcagggagcgcgggggcccgcgcagcagcgaccacgccccggggacacccccaagaggggggca

SEQ ID NO: 243138 - RNA, 71 nt, Homo sapiens
gaggcagaagcgaccagagcgaaaaacagggaggagaaccccaggaccccagcgaacccggggccagacga

SEQ ID NO: 243139 - RNA, 79 nt, Homo sapiens
agaacgaaccaaccccacaacaccgccggagacagccaaggccaaacacccagaggaaaacgaacccaggaaacaggcc

SEQ ID NO: 243140 - RNA, 80 nt, Homo sapiens
caaaacccccaccggacggaaagacagacggaagacgcggcagagcggaggagaaccagagaagaggcacgggagcaaga

SEQ ID NO: 243141 - RNA, 65 nt, Homo sapiens
ggacggggaaggccggggcgcccggcgccggccgagaaggcagaggcgagaagaacggcacacac

SEQ ID NO: 243142 - RNA, 61 nt, Homo sapiens
gcggccgcccacccccggcaaaggcccagcacaaaacacagacaaagaacgcacgcagaac

SEQ ID NO: 243143 - RNA, 73 nt, Homo sapiens
gacgggccggcgcagcaggaggagcgcccgggcagccagaagcagaccaggaggacggaaggaggcacagggg

SEQ ID NO: 243144 - RNA, 76 nt, Homo sapiens
gaagaagcggcaagacaaaaaccaaccaggaacaccagaaggcaaacggccccaccaagaagagaacaaaaagaga

SEQ ID NO: 243145 - RNA, 71 nt, Homo sapiens
gcacaagccagacagccaggacaggacaccaccagcccagggcccacaacggcaggccacagcgggaaagg

SEQ ID NO: 243146 - RNA, 74 nt, Homo sapiens
gagccaccaaggagcagcccgggccaggaccggggacgcccagaaccagcgcaccggcccgccgcaccacgccg

SEQ ID NO: 243147 - RNA, 75 nt, Homo sapiens
ccaggagggccaagcagaagggacaggggaagcaaaggggggcagcagaggagaggaggagggaggggaaaagga

SEQ ID NO: 243148 - RNA, 59 nt, Homo sapiens
cgcgggcgccacgcagcggacacgaggagcccgggcggaagcccggggcggcgacggag

SEQ ID NO: 243149 - RNA, 104 nt, Homo sapiens
aaaaaccaggagacacaaacagaaaaggaagaaagggacaaagagaggagcagacagcccacaccggcaggccaacaaccaagacgaacgaacgcccagacaag

SEQ ID NO: 243150 - RNA, 74 nt, Homo sapiens
caaacgcaaacacaacagaaaaaagaaaacacgaccgaccgccaccgacgccaggcgcgcgacaccgcggaggc

SEQ ID NO: 243151 - RNA, 72 nt, Homo sapiens
gggaagggcaagggggccgaagcaaccaggagaacaacagaaagcgcaagcacacgagccggcaccaaagaa

SEQ ID NO: 243152 - RNA, 69 nt, Homo sapiens
caggcacaccaggagccccaagggccggccggaacccccacaaccgcaggcacagaacacaccagaggc

SEQ ID NO: 243153 - RNA, 56 nt, Homo sapiens
aagacaacagaccaaaggagagaggaccggaaaacccccaaggccaggagagcccc

SEQ ID NO: 243154 - RNA, 72 nt, Homo sapiens
cgccccggcccgcccccaaagcgaccgacccggacgagaaacgcaaggccaagccgacgccagcgggcgcca

SEQ ID NO: 243155 - RNA, 73 nt, Homo sapiens
aagaggaaccgaaacccaagaaaaaccacccagcaaagaagcaagcagccaagaagaacaagcgggggaacgg

SEQ ID NO: 243156 - RNA, 52 nt, Homo sapiens
ccagaagacagagggcgaggggggccgggagaccccccccacccggcaggcc

SEQ ID NO: 243157 - RNA, 76 nt, Homo sapiens
cgagaccgccaacaggacaccgaagccaaccgcaacccgaccaaaccgagaaagagaaacggaaagccgaaaggag

SEQ ID NO: 243158 - RNA, 84 nt, Homo sapiens
caccagccggaggcagggggacagcaccccacacagcgcggcggagcaggagagcacacaaaaacaaaaacagagaaggagaac

SEQ ID NO: 243159 - RNA, 70 nt, Homo sapiens
cagcagccgaggaaagacagcagcaccaaaaaagcggaagaagagcaccaaaaagaacagaaaagaaacc

SEQ ID NO: 243160 - RNA, 61 nt, Homo sapiens
aagaacccaaggaccaagcccaggacccagcagcccccaagccagagaaaaccgcggaccc

SEQ ID NO: 243161 - RNA, 76 nt, Homo sapiens
cggcaggcaaggggcggaagaggccagcccagccgggggccggaggcagggcggaggacccaaagacaggaccacg

SEQ ID NO: 243162 - RNA, 80 nt, Homo sapiens
ccgggacgagaaagaaaagacaacccgaggagaaagaggcagccgagcacccccaaacccagagggcccacagcggagaa

SEQ ID NO: 243163 - RNA, 45 nt, Homo sapiens
gccccagcgagcacccgaggaagggagaacagcagcaacaccgga

SEQ ID NO: 243164 - RNA, 76 nt, Homo sapiens
ccgccccgacccgggcgaagagggagacaaggggcccagcccaaagaagcacagcagcagcagaggccgggggccg

SEQ ID NO: 243165 - RNA, 63 nt, Homo sapiens
cccagggagcggcgcagaccgagacccggacagggcaggaaacaggaagacagaccgccagga

SEQ ID NO: 243166 - RNA, 74 nt, Homo sapiens
aaagaagccaaccggagaaccaggcccacccagggcaggagagaacagaaagaccaagcagaagagaggacaaa

SEQ ID NO: 243167 - RNA, 68 nt, Homo sapiens
aaacaagggaaccgcacgccagagaaccgcccgcaacacaacaggggccaggcacaaagagggcggga

SEQ ID NO: 243168 - RNA, 77 nt, Homo sapiens
gaacagcagcacagcaaaggacggacaggaagacccccacagcaccagaggaagcgcaggccccacgggcccagccc

SEQ ID NO: 243169 - RNA, 62 nt, Homo sapiens
gacaccacagaccacacgcgcacaggggggcagggacgcccgcaccagacacgagaacgagc

SEQ ID NO: 243170 - RNA, 75 nt, Homo sapiens
caacgaaaccaggcaccaggcggagccgggagcggaggaggccagcagccaggcagcaggccgcacagccccagg

SEQ ID NO: 243171 - RNA, 85 nt, Homo sapiens
cgaggcagagcggaaggaggaggagaagaaacccacccagggcaaaccaggcacccccgcacacccgaggccggccaggagggag

SEQ ID NO: 243172 - RNA, 74 nt, Homo sapiens
acaaaagagcgcgaaagggagaaacgaagcccagaccccacaacaaagccggaagaaagaaccaaacagaggca

SEQ ID NO: 243173 - RNA, 83 nt, Homo sapiens
cgcagaaggccggggccggccagaagcgggcggcgcgggggagaggcaaggcaaggaggaccaagcgaaaaacccagaagaaa

SEQ ID NO: 243174 - RNA, 78 nt, Homo sapiens
ggccaacacggcgcgaaagccagggaagggagcacgcgggggcggccacccgcaacaggacgggccccgcagcacgca

SEQ ID NO: 243175 - RNA, 69 nt, Homo sapiens
gagaaaaggaaccggccccgggaccacaaccagaacggaaggcgacagcggggaaagagcaaggaagag

SEQ ID NO: 243176 - RNA, 94 nt, Homo sapiens
gcccagggcagggagcaggcgagggaaggaccgacaggggcccaacacacccaccaaccgaagcccccaaaaggacagagcgggagccaccagc

SEQ ID NO: 243177 - RNA, 59 nt, Homo sapiens
cagcccgagcgcccggcgggcggaggcccacgacaaaagcaaccccgaaacaccgcggg

SEQ ID NO: 243178 - RNA, 66 nt, Homo sapiens
gaaaaaaaccacaaagcggccgaaacagaaaacaagagaccacagaaggaggcaacccacacacga

SEQ ID NO: 243179 - RNA, 87 nt, Homo sapiens
cgaggggcgagagacggcggcggccgaaagcggagagagcgggcgggcggccgggagacccacaggaccgggcaaggagggacagcc

SEQ ID NO: 243180 - RNA, 64 nt, Homo sapiens
cgcgggcacacaaaacaccaaccaaaagacaccggacacgcaggcgggcaggggcacggccagg

SEQ ID NO: 243181 - RNA, 73 nt, Homo sapiens
acagaaggggacagcaccgcgaaagccccaggggccaggacccacaggagaaagcccgaacgcgggaagaacg

SEQ ID NO: 243182 - RNA, 78 nt, Homo sapiens
ccggcagaaagcacaggccgcagacagcgcacgcccacacacaacgcggcagccggggccagaggaggaccacaacca

SEQ ID NO: 243183 - RNA, 71 nt, Homo sapiens
agagaagagaagaacagcacaggacaggcacaggaagagggcggcacgcggccagagagcacaacgggagg

SEQ ID NO: 243184 - RNA, 82 nt, Homo sapiens
ccccagaccgccagagaccggcaaagacacagacacggcgagcaccacccgggagcagagacgcgcaccagaagaagggggc

SEQ ID NO: 243185 - RNA, 81 nt, Homo sapiens
cacggaggacgggaaaaccagcagcaggcccggggcgggaagcgacccagcaaaaagccagcccggccacccgcagaacaa

SEQ ID NO: 243186 - RNA, 66 nt, Homo sapiens
ccccaagaaaacacaaccgaaaaggaagccaccccagaaagacccacacacgccggggccggcgac

SEQ ID NO: 243187 - RNA, 88 nt, Homo sapiens
ggacggcggcggcgcagccggaacccgccagggccagggccaggccagcgcccggcggcccagaggagcaagaggggggggccccccc

SEQ ID NO: 243188 - RNA, 68 nt, Homo sapiens
gggggagacagagcccggaaccacaaagcacgaccggagggggaaagggcggaagagcgcgggagggg

SEQ ID NO: 243189 - RNA, 120 nt, Homo sapiens
cgggagaagcagggaaggaggccgagccgggaccaggcccgggggcggcggccacgccaaggacgggaagaccgcaggaaagcaggaaggcaagaaagccaaggacgaaacccacacgga

SEQ ID NO: 243190 - RNA, 71 nt, Homo sapiens
cggagccggggacaaaaaagcgccagaaagcaaaagagggccaaagcacgaggagcgggaagggaagaaga

SEQ ID NO: 243191 - RNA, 70 nt, Homo sapiens
agacagagggagaaagaacaagagggacggacacagggagggccaagaacccgggaggaggggaacaccg

SEQ ID NO: 243192 - RNA, 77 nt, Homo sapiens
ggggagccaaggaaacaggagcgaagcccagcgggccggacggggcggggggaacggacacagacggaagggagggc

SEQ ID NO: 243193 - RNA, 70 nt, Homo sapiens
gggggggaagccgcagcggaaagcaggagcacaggccgggagagagcgcgaaccggaaaaagaacgacgg

SEQ ID NO: 243194 - RNA, 83 nt, Homo sapiens
cagggaaggaagcaaagcaaaggagaaggcagcgggacggacaggcagggaagcaacgcagagaaagccaaggacacgcagga

SEQ ID NO: 243195 - RNA, 49 nt, Homo sapiens
gcggcccgcagaacgccagcagaagcccagagaggaccaggaaaaaccc

SEQ ID NO: 243196 - RNA, 74 nt, Homo sapiens
ccaaccaacaggaaacgaaagcacaagccgaaccgagcagcgaacaaagcaagccgaggacaccgagagaagac

SEQ ID NO: 243197 - RNA, 72 nt, Homo sapiens
cgggcccggaccgcccccgagcccggaggggggagaaaagagccaaaggcagcgaccggaggcgaccaacag

SEQ ID NO: 243198 - RNA, 64 nt, Homo sapiens
cagaacggcgagagcggagcgggacccgcgcaaagccaaagcaagagccaccgacagaaaagca

SEQ ID NO: 243199 - RNA, 81 nt, Homo sapiens
gcaaccccgggcggccgcaccgccagagaggggaaaggagaaaggaccgcacagacccccaacaccacaagacagagccag

SEQ ID NO: 243200 - RNA, 70 nt, Homo sapiens
gaaggaccaagaaccagaggcccacgcggaccggcagcgccaccggaccaccagacaaggacacggccca

SEQ ID NO: 243201 - RNA, 65 nt, Homo sapiens
ccgcggcgcaggaggcggggagcgcagagcgggcgagcgcgaacacgccaaaaagaccaggggga

SEQ ID NO: 243202 - RNA, 46 nt, Homo sapiens
gcgcagaaggggacagaacagccgagaccgggaggaagcggagaaa

SEQ ID NO: 243203 - RNA, 57 nt, Homo sapiens
ccccgggagacgggccgggagcccggccacggcaaaagcagaccggaaaacccaccg

SEQ ID NO: 243204 - RNA, 80 nt, Homo sapiens
agacgaggagaggagaagagcgaaagaggccagcagagaagaaccggccaggagcgagggcgaaccggcagaggcccgac

SEQ ID NO: 243205 - RNA, 75 nt, Homo sapiens
gcgcaaacaccgcaggaagagccgacaggcagccgagggagaagcggaaggcggcaggaccaggcgggacacccc

SEQ ID NO: 243206 - RNA, 78 nt, Homo sapiens
caccaaaacaaaaccccaaaacgcagaccccaaaaagccaggcccagacagccgccgaagaaaagcccagggagcccc

SEQ ID NO: 243207 - RNA, 87 nt, Homo sapiens
gaaagcaccggaagaccccgaaggaaaaggaggaacgccggcccgagaaagcccgccagcaggaggagcaccgaacagccagcccga

SEQ ID NO: 243208 - RNA, 78 nt, Homo sapiens
gccagcgccggcgggacccgagcgcaagggcggaccgggaagaaccaaagcgcaaccaccaaaggaagccgccaagcc

SEQ ID NO: 243209 - RNA, 82 nt, Homo sapiens
gaggcaacgccggggcgcccgaggcggaaggcgcaggcagaccagggccagagcaccagaccagcagaggagcgccgccagg

SEQ ID NO: 243210 - RNA, 73 nt, Homo sapiens
caggcaccggggggcaacacccgagaacggcgggaagagaagacacgagcacaaacgaagcggagcaaacccc

SEQ ID NO: 243211 - RNA, 72 nt, Homo sapiens
acccaagagagaacgaggaacagagaagagcagccagccccccaggccagagaaggggcaccacgcaagagg

SEQ ID NO: 243212 - RNA, 76 nt, Homo sapiens
ccggacggacacgagaccagcacccaagagccaacagacaagggaggcgaggacggacaaaaggaaacggacggga

SEQ ID NO: 243213 - RNA, 72 nt, Homo sapiens
caggagaccagcaaagaaccaggaacaccacccgcaggccccaaggacgccccccaaggacacggaagcacg

SEQ ID NO: 243214 - RNA, 72 nt, Homo sapiens
cacagaaaaagagaaagaagagcccccccaccacgaaaaccggagaggagcggaaggaggagcccacggcag

SEQ ID NO: 243215 - RNA, 71 nt, Homo sapiens
cacccgggcccgccgcccccacacgggcagcaggacaggaagcagggagccaagcggcaggaaaggaccca

SEQ ID NO: 243216 - RNA, 85 nt, Homo sapiens
ccaaagccgcccagacggccaccggcgggaggaacaaaaggcgccccagaagcgcgggcacaccacgccgaaagcggcgccagcc

SEQ ID NO: 243217 - RNA, 78 nt, Homo sapiens
ccagaggccacaggacgaaacagcagacagaagagcagaccaccaaggcgcggcagcgcccccaggagggaagccaca

SEQ ID NO: 243218 - RNA, 71 nt, Homo sapiens
cgggagcccggcgcggcaagggccccagcccccgcaggcccaagaaaagcccaaagaacgccaaagagacg

SEQ ID NO: 243219 - RNA, 54 nt, Homo sapiens
cagcagaagccgaacggccgaagaaagaagcagagcgaggcccggcagggcccc

SEQ ID NO: 243220 - RNA, 65 nt, Homo sapiens
gacgggggaagccaggcaccccccacagaaagggcgggagacaacagccacacaaagcagcaaca

SEQ ID NO: 243221 - RNA, 99 nt, Homo sapiens
gcaaggagccaccagcacggaccaggaggcgagcaacagggcggccggaacagcagaacaaggccggagaccaaggggaacgcccagcagcagaccaca

SEQ ID NO: 243222 - RNA, 73 nt, Homo sapiens
cgaccaccggggacagagggccgcaagcagggggaacacccgcccagccgccggacccagaagcacacgaccc

SEQ ID NO: 243223 - RNA, 72 nt, Homo sapiens
ggaaaagaaacgcacaagcacgcccccagccgaaacacggagagcaacggaacgggacacacaccagaggga

SEQ ID NO: 243224 - RNA, 69 nt, Homo sapiens
gccgccgaccccccggcgccgcgccggcggcgcaacggggcggcacacaaggagcgaagggcagggaga

SEQ ID NO: 243225 - RNA, 76 nt, Homo sapiens
cagcacgaccaccacgaacggccgcggacacagggcgcaggaggggggaccccggcagcgccacccccccgccgag

SEQ ID NO: 243226 - RNA, 54 nt, Homo sapiens
aacaccgaaccgccacccaggcccaagaagggaaagggagcagcaccggccaca

SEQ ID NO: 243227 - RNA, 82 nt, Homo sapiens
cggggaggagccccgcggggcggagcaacagcggcggggcggcagcaccacgcgcgagagaccacccaacacacaacggccc

SEQ ID NO: 243228 - RNA, 82 nt, Homo sapiens
ccagaaaccccccgaagaagaccccccacacgggccaaggaaccgaacccaaaccagccggccaaagagaagagcaaaaaaa

SEQ ID NO: 243229 - RNA, 50 nt, Homo sapiens
gggcaccgccaacgggggccggacaggagcaccaagcggcggggagggca

SEQ ID NO: 243230 - RNA, 81 nt, Homo sapiens
gggcgccgccacggccgcccggagacaagccgagaccaccaggagcagagcggaggcaaccagccaaaacaacggaaaaca

SEQ ID NO: 243231 - RNA, 84 nt, Homo sapiens
aggccgcccgggagcggagcaagggagaagacaacacaccgaggagcgcgggcgcggagacacagcggccagagcagcgaccgc

SEQ ID NO: 243232 - RNA, 74 nt, Homo sapiens
aacccaccagcagcaaagagcaaccaggagagagagagccccggccacccacccccgccggaccggcaccccgg

SEQ ID NO: 243233 - RNA, 80 nt, Homo sapiens
agacagagcgacagagcgcgggcagcccaagaagacagagaccagcaagcagccagagccccccaagagaacccaggggg

SEQ ID NO: 243234 - RNA, 93 nt, Homo sapiens
ggagcagccaaggccgaggaagggcagcccccccccaacaacggacacggccccagggcaaagagcggcagaagggaggagaggagggggagg

SEQ ID NO: 243235 - RNA, 85 nt, Homo sapiens
ggcaccaggaaggggacgggacggacgggaggggcgccgcggcggcgggcgcccccagccacgagagaagaaagaaaaagaaacc

SEQ ID NO: 243236 - RNA, 80 nt, Homo sapiens
ccacggaaccagcagccccaggggagcccaggccaaacacacaggaacgccagaccccagccgagggaggcaacagcaaa

SEQ ID NO: 243237 - RNA, 60 nt, Homo sapiens
cccgaagagccacggaacgaaaaccagacgacccagggggagcacaagacagccccacgc

SEQ ID NO: 243238 - RNA, 75 nt, Homo sapiens
cccaaagcgcaagcagacgaagaaagagccccaagcagcacgcaaacgcaccacagccagaccaggcaagggcca

SEQ ID NO: 243239 - RNA, 80 nt, Homo sapiens
cggagggggccggggagcccgaccggaccgcggagggagacaacagccacacaaagcagcaacaggagcagggaagaaaa

SEQ ID NO: 243240 - RNA, 74 nt, Homo sapiens
cgccgccgcgcagcgccgcgcggaaagcgaagccaacaaagaaaggaccggggcaaaacggccagaaggcccaa

SEQ ID NO: 243241 - RNA, 81 nt, Homo sapiens
aaaccacacccgccacgagggaggaggaggaggagccaggagcggagccaaagaccacgggggccaaacaccaggagaagg

SEQ ID NO: 243242 - RNA, 86 nt, Homo sapiens
gagaagccagcgcagcccgcaggccaagcgcagccccaccaggcgcggggaggcccagcccgccgcagggccaccccgcggcccac

SEQ ID NO: 243243 - RNA, 65 nt, Homo sapiens
gcacagccggcgacggcgcggacgaagaaaccgaacaagaacgaaccacaccaggcgcaaccagc

SEQ ID NO: 243244 - RNA, 74 nt, Homo sapiens
ccccggacaagagaccccagacgagaaggagagaacacagagcccagcagcggagaagcacaggacacgccaaa

SEQ ID NO: 243245 - RNA, 77 nt, Homo sapiens
accgccgcagcggcgcagcccacgccagacgaccccacccgcgccgcgacccggccgccgccgccaggaaccagagg

SEQ ID NO: 243246 - RNA, 80 nt, Homo sapiens
cccccgacggaagcaggggcgcaacccggacaaagcccagaagcagggacgggagcagcggaaggcccagaccgagcggc

SEQ ID NO: 243247 - RNA, 61 nt, Homo sapiens
gggcagaggaaaagcaagaagacgaggagcaggcgcaaaaaaagcaaaggcaggagaggga

SEQ ID NO: 243248 - RNA, 79 nt, Homo sapiens
acccccaacaccagcaccgcagaggcaaggggccaccaggaggccagggggcgccaggggggggaagacaacccggaga

SEQ ID NO: 243249 - RNA, 97 nt, Homo sapiens
agaaaggagacccgacgcaacgcggagcgcaaggcgagggacgagaacgagaaaacgcagaacaaagcgggacagacccgcaaggaagagccggaca

SEQ ID NO: 243250 - RNA, 52 nt, Homo sapiens
cccgccaggcagcaaaaacaagcaggccagcgaagacggaggaccacaccgg

SEQ ID NO: 243251 - RNA, 35 nt, Homo sapiens
acgggccgcgcgaaaaagcccggaaacagacagca

SEQ ID NO: 243252 - RNA, 42 nt, Homo sapiens
acccgcccagcggccgaggaccgaaggagaagaaggagaagg

SEQ ID NO: 243253 - RNA, 69 nt, Homo sapiens
cgcgccacccccagcgacgcccggaaacggccacacggagccaggacgccacgcagccaggagccggac

SEQ ID NO: 243254 - RNA, 83 nt, Homo sapiens
cgacacaggcggggccgacgggggagacggagccccagcgaagagagagaaacgaaaaagaggaaggagcgagggagcacaag

SEQ ID NO: 243255 - RNA, 80 nt, Homo sapiens
caaaaacaggaccaggaaaggcacagaggcgaagaaagagacagcaagagcccggccagaaggaggacaggaaaaagccg

SEQ ID NO: 243256 - RNA, 62 nt, Homo sapiens
gaacaaagagggacacgcagagaccaaggcggagcaccgaaaaggggcaaaagcaaacacgc

SEQ ID NO: 243257 - RNA, 61 nt, Homo sapiens
caagggcacagagggagagcacccaggccacagaggaggaaagagaggggaaagaagcagc

SEQ ID NO: 243258 - RNA, 73 nt, Homo sapiens
gcaagaaaaggggcccgggaggggaaaaaccagagacccccgaagacggaagaaaacaccggagcccaagaca

SEQ ID NO: 243259 - RNA, 82 nt, Homo sapiens
ggaagcgcagaaagcaggcgaacccgcggcgcaaaacgagggggcccggaggggcgcccaggccgagcacccaggcgcagac

SEQ ID NO: 243260 - RNA, 64 nt, Homo sapiens
agggagcgggggagacacagaaagagaccgggagcgaagagcaaggcaccggcaccggaccaac

SEQ ID NO: 243261 - RNA, 88 nt, Homo sapiens
  misc_feature (47)..(88): n is a, c, g, or u
ggaccacccgcgcgacgcccgagaccaccgggagccacagcacgagnnnnnnnnnnnnnnnnnnnnnnnnnnnnnnnnnnnnnnnnnn

SEQ ID NO: 243262 - RNA, 85 nt, Homo sapiens
gagaaggagcgcccgccggcgggacccgccccgcccggagccccggcccccacagacccaacagaggaagccgcaagaaacggga

SEQ ID NO: 243263 - RNA, 72 nt, Homo sapiens
aaacaagacggggcgccccacagaggggcgacgacccaggaaaaaacaagggcgagaaaaggaggcgccgac

SEQ ID NO: 243264 - RNA, 82 nt, Homo sapiens
agagagagaaacaggggagcaagggcaagagccacaaagggaccgagaagcgaagacaaggggaccccacaccacaaaccga

SEQ ID NO: 243265 - RNA, 42 nt, Homo sapiens
ccccaagggcgggaacaggacgcgggcgcagcgagcggggag

SEQ ID NO: 243266 - RNA, 80 nt, Homo sapiens
gcaggggccaccagggccaccaaccccacccagacgaagccgaagaaaagaaaagcgagccgaccacggagcggaaccca

SEQ ID NO: 243267 - RNA, 73 nt, Homo sapiens
gggcgggcggccgggagacccacagcaacgggaaagaggagagaagcgggcggggcaaacgagccagggagcc

SEQ ID NO: 243268 - RNA, 74 nt, Homo sapiens
gcccagaagcggggacccgagacgcaagccccagcgaccccaagcaaaccgggccccaaggaagaaaacagaaa

SEQ ID NO: 243269 - RNA, 74 nt, Homo sapiens
caggaggcgcggacacgcaaaccacacaaggacagggcagaccgccagcagcacagcaagccacagagagggcc

SEQ ID NO: 243270 - RNA, 83 nt, Homo sapiens
cgcaagcacacccaccgaaacaagacagcccggaccgacaggaaagaaggagcccacaaagaaaagaacaccgccagcagcca

SEQ ID NO: 243271 - RNA, 99 nt, Homo sapiens
cagcgaaccaaagcgaacaaggcaacgcaaccaggagaaaagacagcaaggaccgaggacgcagggcagggccgcccaagccgaagagacaagcaaggc

SEQ ID NO: 243272 - RNA, 58 nt, Homo sapiens
cgcgagcggaccaggagggcacccccgggacggacccccagcaacccagaagccagac

SEQ ID NO: 243273 - RNA, 91 nt, Homo sapiens
gcgcgaagcgagcgagaaggcacggagcgccgcggagcgcagggcaccagggcaggggacggaggccaaacacgcagaggccgacgggaga

SEQ ID NO: 243274 - RNA, 78 nt, Homo sapiens
gaccaccacaaaaagcggcacagcaaacacacaagagccagcaaagggagcagcacagaggcagaacagacagcaagg

SEQ ID NO: 243275 - RNA, 85 nt, Homo sapiens
gaccaggcgaagcggccgagcaggcgagcgaacgacggggagaccacacccaaaacgaaacgggaggcagccagaaggaagaccc

SEQ ID NO: 243276 - RNA, 72 nt, Homo sapiens
gaagacgggccccaacacccagagacgaaagggaaccacccgccccgaccaggagaggacagacagccacac

SEQ ID NO: 243277 - RNA, 37 nt, Homo sapiens
aaagaaggcacggaaagagagaggccgggggggcaaa

SEQ ID NO: 243278 - RNA, 71 nt, Homo sapiens
ggcaaccaacccgaggcgaaacaaaagcgacacccaaggagaaaaaggaggggcccagagccggccggccg

SEQ ID NO: 243279 - RNA, 73 nt, Homo sapiens
acggcggcccgaagccagcgccccaccggggcaagcagaagcacagcccagaacgccaagagaaaaacacggc

SEQ ID NO: 243280 - RNA, 77 nt, Homo sapiens
agaaacagaggagggaggcacaaaaagagagggccacgagagagaaagacacagaccagcaagggagcagaacgaga

SEQ ID NO: 243281 - RNA, 76 nt, Homo sapiens
cgggggggggaccagccagccccccaggaccacagccccgaccgagagaaccagcgccagagagacggggcgccag

SEQ ID NO: 243282 - RNA, 85 nt, Homo sapiens
agaaggaacggccaggacgcaggcaaagagagccaccaagaagccacgggcgggaggccaggcagcacgcagacaagaagcgcag

SEQ ID NO: 243283 - RNA, 39 nt, Homo sapiens
gcgggaccagacaccgcggaagcgcggagccggagcgag

SEQ ID NO: 243284 - RNA, 75 nt, Homo sapiens
agagcaaacaaaaaccgacacggaaccagaggcagcagcccaaccccgaggacagcccaggccacgcacccaccc

SEQ ID NO: 243285 - RNA, 87 nt, Homo sapiens
ggagccacggacaggaaagccggagcgaagccaacccccgagcagggggacgaccaccagccaggccggggacaaacaggcaaccga

SEQ ID NO: 243286 - RNA, 66 nt, Homo sapiens
agagcggagggggaccaccccaggaagaagacaacagacaaggccgacgcgcacgaacacgggggc

SEQ ID NO: 243287 - RNA, 67 nt, Homo sapiens
cgagccgaccagagagaacaaaccaggggagggaaacgagaaaaacgacgccagcggcggcaagcgg

SEQ ID NO: 243288 - RNA, 59 nt, Homo sapiens
caaagccccagcccaacaggaccgccgggggaccggaacggaccaaaccacagcaaaaa

SEQ ID NO: 243289 - RNA, 100 nt, Homo sapiens
agacggcgcccagcaacacagaagccgacaaggcgcaagcgaaaacagaccgcgagcccagaggaggcagcacggcaggagacgaggagaggacagcagg

SEQ ID NO: 243290 - RNA, 56 nt, Homo sapiens
aacggggccagaccaggggaaagccggggccccggggacccgcggcacggacaggc

SEQ ID NO: 243291 - RNA, 79 nt, Homo sapiens
aaccagacgcgcggccaaggccacccaagaacggcccgccaccggagacaacgagaggaggcgggcgccacggaaagga

SEQ ID NO: 243292 - RNA, 72 nt, Homo sapiens
aagagcaaagcgccaggccaaccagagacaccagcaggacaggaaaaaaagagcaggcagcaggggaaccgc

SEQ ID NO: 243293 - RNA, 75 nt, Homo sapiens
caaggaggaagaggccaggcgggagcaccccagcagcagcccgcgcccccgaggagccaaggcacaaaacgacag

SEQ ID NO: 243294 - RNA, 63 nt, Homo sapiens
cagccgcggggcgcaggaggcgggcacagcgccaagcagaccagagcaaaaaagacacaggca

SEQ ID NO: 243295 - RNA, 73 nt, Homo sapiens
gggggggccggaggagcagcgggccagaacggccaggagacgcaacggaaacgaaaagagacagcagggcaaa

SEQ ID NO: 243296 - RNA, 71 nt, Homo sapiens
cagacaccaagggaggccacagagacaagagagaggacaccgccgaccccgaacgccacaaacacacagca

SEQ ID NO: 243297 - RNA, 42 nt, Homo sapiens
gcaagacaaccacaggcagagagagaaaggacagggacagga

SEQ ID NO: 243298 - RNA, 77 nt, Homo sapiens
aaccagcacgaggccgggggaggcggaaccagcgcaagccagaagcgcgcccccgggcgcgccggacaggccgccgc

SEQ ID NO: 243299 - RNA, 81 nt, Homo sapiens
gcggcgggcaggcggcggaggacacccgcgaccagaaaggagacacggcgcgccgcagcagggggaagaagagaaaacgag

SEQ ID NO: 243300 - RNA, 80 nt, Homo sapiens
aggggacacccagaagcggcgccgccggcagaacaccccaccagaccacccagcaagcccacaaaaaaggcacaagcagg

SEQ ID NO: 243301 - RNA, 60 nt, Homo sapiens
caaaaaagaagaaaggcgaagaaagaacgccgagaggccaaaaccagaccacgagagcag

SEQ ID NO: 243302 - RNA, 74 nt, Homo sapiens
aacacaccacgacagaccaagaaggcggcaaagaacagggcgcccgcgccggcagaggaggcgagcacccgcca

SEQ ID NO: 243303 - RNA, 82 nt, Homo sapiens
gcggccagaagaaaacgaggggcggaacacccgccaaagcagagaaaaaaccccggaaaaggagacagaagcgcaagaaccc

SEQ ID NO: 243304 - RNA, 89 nt, Homo sapiens
gcggaagaccgcgcgcagggccgcagcgggagcggacggcgagcgcgagcggcgcgagaaagcggacaggaagcacggcagcacaccgg

SEQ ID NO: 243305 - RNA, 85 nt, Homo sapiens
gcgggccccggacccggagacaccccgcagcacagccgcgaccaaggagaaacaggcgccaaacgacagagaccccaccacgggc

SEQ ID NO: 243306 - RNA, 79 nt, Homo sapiens
agcgcgccaggcccggccaagcccaggcggcaccaggagcggagaagccaggagaccccaaccaaagagcggggcccgg

SEQ ID NO: 243307 - RNA, 72 nt, Homo sapiens
cagaaaagaaagcgacgggagaaggaaggggcccccacggggagaaggaacaaccaaggggagcgaagaaac

SEQ ID NO: 243308 - RNA, 79 nt, Homo sapiens
accgccagccccggcagccgggcggcaggaccgggggccgaggcgccggggaccccagaaggacacgggcggggaccgg

SEQ ID NO: 243309 - RNA, 82 nt, Homo sapiens
gcaaaaggagagacagcaacaagcaaaccagccagcacgggggcccagccagccagcagcgaggggggacggaggcggcacg

SEQ ID NO: 243310 - RNA, 77 nt, Homo sapiens
aaagagagagagcaacgggaccaaaagaagccaacacacggagcacagagagacccaagagaagggccagaagagag

SEQ ID NO: 243311 - RNA, 52 nt, Homo sapiens
cacaccccccggagaagagccaaggaacacgaggacgcaccgcggggcgccg

SEQ ID NO: 243312 - RNA, 121 nt, Homo sapiens
ggcggaccggacccggaagcggcagcgaggagacccggcgccgccaggccgacgaaaagcccaagaggcggccccaggggggaccaacaagggagaaccaacagaacaaccggaggaagaa

SEQ ID NO: 243313 - RNA, 59 nt, Homo sapiens
cccaagggcaccaaagcgaaggaggagccgaggaaggcgccaccacgaccgccgaaccg

SEQ ID NO: 243314 - RNA, 60 nt, Homo sapiens
cagaaacagacagacagagagaaccaggcgcaacaggccaagaaaaggagacggggcggc

SEQ ID NO: 243315 - RNA, 111 nt, Homo sapiens
cagcaccggacggacgagaacgccacggaccaaagcggagagagaggagaaaagagcaaacgagacggaagaaaaaaccgacggcccgaaccacagccaacaagcagccag

SEQ ID NO: 243316 - RNA, 70 nt, Homo sapiens
agcccaccaacaggccggaagcggaagccagggagccccgcacagacccgccggacgggagcccaggacc

SEQ ID NO: 243317 - RNA, 80 nt, Homo sapiens
aggcagaggcgaggaaaaaaccacgacaaaaccacccaagagcccagccaagccagaaccaggggcaacagacacagcca

SEQ ID NO: 243318 - RNA, 74 nt, Homo sapiens
gaaaccggaggaagcaaccacagcgcaggcaagaccagacaaagggagcaccagccagaccgggaagaaacgaa

SEQ ID NO: 243319 - RNA, 79 nt, Homo sapiens
gaagagagcccaagaacaaagcgccccaaaagagagaccaggaaggaaaagcaaaaccagcaggccagagggagcggcg

SEQ ID NO: 243320 - RNA, 72 nt, Homo sapiens
cacaaagggagcagggagaggagccgggaaagggagggaaccagcaacaagccagggaccccggcccagcac

SEQ ID NO: 243321 - RNA, 74 nt, Homo sapiens
cccgccccggccgcgcaagggcacccgcgacgacgagacgacacccaaaggagcagcgcaggcaggaagaacca

SEQ ID NO: 243322 - RNA, 70 nt, Homo sapiens
gagagaaagagggacagccgcacggaggcgaaacacaaagggaggggggagaagggaccaggaagacacg

SEQ ID NO: 243323 - RNA, 73 nt, Homo sapiens
aacagaggaacagaaaagaggacagaaagagcagaaccgaacacacagcaagcaaacccagagcaagcaggcc

SEQ ID NO: 243324 - RNA, 75 nt, Homo sapiens
gcgaccaagccacggacaacgaaacaaaaaggaaaaggcagcaaacccaggacaaggaccaaaaggaaagaagac

SEQ ID NO: 243325 - RNA, 40 nt, Homo sapiens
caaggacaacagagcgccggaggccccagggcaaagagcg

SEQ ID NO: 243326 - RNA, 78 nt, Homo sapiens
cccaggaccaaacggaggcagaaggaaccaggggaaaagagcacaaacgagcccaaaccgagcagaacgggaggagga

SEQ ID NO: 243327 - RNA, 85 nt, Homo sapiens
cggagaccgggcggccgcagagacgcgcaacccagaggaaaggagcagggcccgggaagccaccaacgcgaccacggccaagccc

SEQ ID NO: 243328 - RNA, 57 nt, Homo sapiens
aacaagcaaagccaaaagaccaaagagaacccgacagaagaaaagggggacccacag

SEQ ID NO: 243329 - RNA, 74 nt, Homo sapiens
cagcgcggaggccccgccgagaaaaggcggggccagcgccgacagaacccgggcggggccagccagacggaggc

SEQ ID NO: 243330 - RNA, 73 nt, Homo sapiens
gggagacacgcgaaagcaaaccgaggaggaggagggagacaggggcaaaaaacggcagggaagaggcgagaca

SEQ ID NO: 243331 - RNA, 127 nt, Homo sapiens
gccccaaggacagcagaacaaagaaagcaaaagaaaaagaaaacagaaagcaacaaagcaacagaaccggaagaccggaaggcgcgagaaagaacgggaaaggcggaacaggaaacagcagggcgaa

SEQ ID NO: 243332 - RNA, 35 nt, Homo sapiens
ccgagcagcgggacacaggggagcgccggccaggc

SEQ ID NO: 243333 - RNA, 72 nt, Homo sapiens
ccgaggcaccacccaagcgggagaccggcgacggccggcgacacccccaccgccacgggcaaccgcgcgcgg

SEQ ID NO: 243334 - RNA, 77 nt, Homo sapiens
cgacgagcgccgggacccagggcgagccggaccagagggccacccgaaacggagcgggacgcaaggcccacgccaca

SEQ ID NO: 243335 - RNA, 71 nt, Homo sapiens
acaccaggaaaccaggcagccaaggcaggacaagcacacaagaagagacccagacgaagagcgcacagaaa

SEQ ID NO: 243336 - RNA, 76 nt, Homo sapiens
gaggggaacccaccgggggccacgcacaggcacacaaggccggcccccagcaggccggagcgcgaagacgcaggga

SEQ ID NO: 243337 - RNA, 76 nt, Homo sapiens
gaaacagcaagcggcgggacgaccggcgagcgggggaacgcggacaggggcagcacccggaaggcagagagcccgg

SEQ ID NO: 243338 - RNA, 61 nt, Homo sapiens
accacaaacaccaagacacgagggaacaccccgggaaggaacaaagcagagaaaccaaaag

SEQ ID NO: 243339 - RNA, 64 nt, Homo sapiens
gcccagccaggagcaccgccgaggacccagcacaccgaggcccaggcgaacggccggagaacca

SEQ ID NO: 243340 - RNA, 79 nt, Homo sapiens
cacagccgcggccggcgcaccgcggcagaaggccccaagcgccgcgaccaaaaagagccaagcgagaagagagaaccac

SEQ ID NO: 243341 - RNA, 121 nt, Homo sapiens
acagacacccgccacaccgcagcagacagagagacaagaccccagccagccccgccaggcagcagccccaaggaggcccgccgacgacgaccaggccaggcaccacacgagaccagacggc

SEQ ID NO: 243342 - RNA, 67 nt, Homo sapiens
gaacacgcaggaggggcaaccagccaggaaaaccgagccgccgacagaaggagcacaaggcagccag

SEQ ID NO: 243343 - RNA, 75 nt, Homo sapiens
gagccagcaggcacccacaaggcaacacaggagcaggaggcccagaagggccaaacagccgagagcagagaagac

SEQ ID NO: 243344 - RNA, 69 nt, Homo sapiens
cgccccgagggaagggaggcggcggccccaaaaacaacggcaagcggagaagagcaaggccgaaccgag

SEQ ID NO: 243345 - RNA, 74 nt, Homo sapiens
gcgccccgggagcacagacaagcagaccggaagaccgacggaagaccacaccccgagggagcccaggacaccac

SEQ ID NO: 243346 - RNA, 70 nt, Homo sapiens
agaaggaagaaccacgaagaaacaccacaaaccgggagggaaaacagcccccggccgggaccaggaggaa

SEQ ID NO: 243347 - RNA, 61 nt, Homo sapiens
gcgaccaagaaggagagcgacagcccaagcaccagagaagcgcacggcaccaccgccagcc

SEQ ID NO: 243348 - RNA, 55 nt, Homo sapiens
cgaaggcccggcccacacgggaagcgcgggaagggaaaggggccaaagggcgagg

SEQ ID NO: 243349 - RNA, 56 nt, Homo sapiens
gaagggaaggcgcgaggaggaaaggaggacgagggaccaccaggaagaccggacgc

SEQ ID NO: 243350 - RNA, 75 nt, Homo sapiens
caacacgaaggaggccacgcagcaaaccacaggagaggagagccgagcagcaccaaccaaagagaccgccaaacg

SEQ ID NO: 243351 - RNA, 51 nt, Homo sapiens
aaaaacccaagaaagagcgcagcgggagaagacagagcagcccacccaggc

SEQ ID NO: 243352 - RNA, 71 nt, Homo sapiens
acgaaaccgaacgaaaggagaaacggaaaagacccccagacgaacaagaccaagcgagacagaggcaagga

SEQ ID NO: 243353 - RNA, 82 nt, Homo sapiens
aggggccgcggcccggagcaacaccacgacagcagcagcagaggacccaggagaacccccggacgagcagaacgcaccggaa

SEQ ID NO: 243354 - RNA, 74 nt, Homo sapiens
aaagccagcggaaccggacaaggccccccaccgaagacaagcgagagcggcaccaaaggcgacacaagcccggg

SEQ ID NO: 243355 - RNA, 61 nt, Homo sapiens
gcgccggccgagaaggcagaggcgacagccgacacggaaaagacaggaaacgaccggcgcc

SEQ ID NO: 243356 - RNA, 75 nt, Homo sapiens
cgcggaacccgcccagcggccgaggaagcaaggcagccgccaggagaagcggcaggacaaagagagggcacccac

SEQ ID NO: 243357 - RNA, 104 nt, Homo sapiens
cggcggcagcgggccagacccaggaccgcgacacaaggccgggacagcagaaaacagccagcagaaaaagccaaaaagcaagcggacaaaagaagaaacaagga

SEQ ID NO: 243358 - RNA, 86 nt, Homo sapiens
cacacccccaggcaacgaggagacggaagacaacccagcgccacgggacagccaacaccagaccgagcccacgcgcgccacaggga

SEQ ID NO: 243359 - RNA, 72 nt, Homo sapiens
gcagcgggcgcgcgcggcgggggcgcaccagcccggaccaagagacgaggaaaaccccacccacaaaggcga

SEQ ID NO: 243360 - RNA, 68 nt, Homo sapiens
agacgagggaaaaaagaacccaggacaacgccaacaacgggaggaaaacaaggaaaccaagggaacag

SEQ ID NO: 243361 - RNA, 88 nt, Homo sapiens
gggcgaccccaaaggcaccagaagacccaaaacggaaggcgcgcaagagggcacagcgaccaccgcggcagccaccaggggcgccagg

SEQ ID NO: 243362 - RNA, 64 nt, Homo sapiens
agagagccgaaaacgcaaggccgaagccaaagccagaacaggaagaagaacggccaaggaaagg

SEQ ID NO: 243363 - RNA, 61 nt, Homo sapiens
gaaaaagaagaagcggaaacaacgccccgcaaaagagaaacggcgcaggcgcagccagaac

SEQ ID NO: 243364 - RNA, 70 nt, Homo sapiens
agagcccgccaaaggcccaaaagaccgagagcccaccgagaccgccagcgccacagcaaagaaaaccgaa

SEQ ID NO: 243365 - RNA, 104 nt, Homo sapiens
acccgccgcgcaccgacccgacgcgccggcccacgcgcggccaaggacagcccagagcaagcacacggaggcccgggagccagaccgggagcccgccccagcca

SEQ ID NO: 243366 - RNA, 67 nt, Homo sapiens
gcgaggaggcgcgggagggcgagaacgaccccgagacgacagagcgccgccaccgccgccaccacgg

SEQ ID NO: 243367 - RNA, 78 nt, Homo sapiens
aggaccccggaagccagaaagggaagaaaacgccagagaagcagagcagcccggagcgaggggagaccggggaagcgg

SEQ ID NO: 243368 - RNA, 75 nt, Homo sapiens
cgccagaaacaagaagagaccaacagcaaagcgaggccgaagacccagaggaccccagcaccacagaaaccccac

SEQ ID NO: 243369 - RNA, 85 nt, Homo sapiens
agggcccccgggggagccggcggcggaccccgccgaccaggaagaccaccaagaacagggaaggacaagccagaggcggaggaag

SEQ ID NO: 243370 - RNA, 81 nt, Homo sapiens
aaaagagagagaaaaaggacaaaagccaagaggaggacagcgcacacagcaagcacgaggcagaagagacaacacagaaac

SEQ ID NO: 243371 - RNA, 61 nt, Homo sapiens
agcccacccccaacgcgacggaaaggcacgaaagccagcgccccggggaagacggaagaga

SEQ ID NO: 243372 - RNA, 79 nt, Homo sapiens
caccagcagggacggcgcaggggccgcagccgacgccacacaccccagaacagggcgaaaagggcccggaagggaccaa

SEQ ID NO: 243373 - RNA, 81 nt, Homo sapiens
cggcgccgcgccggcggcgcgcccgggggcggagaaggccaggcagcagcgcaggaggagcccggcaggcagcggccagcg

SEQ ID NO: 243374 - RNA, 76 nt, Homo sapiens
cccagcccccaagaggggaacagccaaaaacaaggcgaaagcaggcgaaagggaaaaccagaagcgcagaaaaagg

SEQ ID NO: 243375 - RNA, 67 nt, Homo sapiens
aagcaaggaggccgcaaagggcacgaagcaggaaagaacgacgccagggagaaagcccagacggccc

SEQ ID NO: 243376 - RNA, 74 nt, Homo sapiens
cgcgccccaggaccagaaagccagaccagaaccccggagcagcgaagaacgcacagggccaagaccaccaagga

SEQ ID NO: 243377 - RNA, 80 nt, Homo sapiens
aggcgggacgcggcgagaaagcacgggggaaacgaccacaggccaccacccaccaccacggagacgcgcggcgccggacc

SEQ ID NO: 243378 - RNA, 79 nt, Homo sapiens
ggcgggcagggccgggcccgcaggaccagcaagaggcaagaagccagaagggccccccccacaacccaaaggagcgcag

SEQ ID NO: 243379 - RNA, 80 nt, Homo sapiens
aaaaaccgaaggccggaaacgacacaacaagcacgacagaaaaaaacggagaaaagccacagagccagggaagggggagg

SEQ ID NO: 243380 - RNA, 72 nt, Homo sapiens
ggccagccaaaagacgaagaaggaggcaaagaaaccagcgggacacgagcaacaggggagaggaagccacga

SEQ ID NO: 243381 - RNA, 52 nt, Homo sapiens
cagcacgccggcccagaggccagaccaacaagcaacaacaacccccagccac

SEQ ID NO: 243382 - RNA, 79 nt, Homo sapiens
gcaacccagcgagagaaagagacaagaggagcagcagcggcaccgcccccacccggagggccgacaaccacagggaccc

SEQ ID NO: 243383 - RNA, 80 nt, Homo sapiens
cggcagccaacaacagccagagacccgaagccacagacacacccagccagaaaccaccaggcagggggcaaggacaccgg

SEQ ID NO: 243384 - RNA, 73 nt, Homo sapiens
aaaagcaacaaagaggacaccaccaaaggcccacggcccggagcccaaaagaaccgagacgaacgaaggcaac

SEQ ID NO: 243385 - RNA, 81 nt, Homo sapiens
caagcagcagaaaagacccccccgaaagcgagcccacaagagccgccgcagggcgaaggcgaggacccccagcccccagag

SEQ ID NO: 243386 - RNA, 69 nt, Homo sapiens
agcccggcgccgaacagaagggcaccacgggacgagcggggcgaagaacaaaggaaaaggaaggaaccg

SEQ ID NO: 243387 - RNA, 74 nt, Homo sapiens
agccgggcagaaaaaccggaacagcccgcaggaagaaacgcagaaaaaaagggagccggcagagaagacaaaca

SEQ ID NO: 243388 - RNA, 83 nt, Homo sapiens
cccaacccacgcgccccaagggcccgacccaggcaagcgagcaggcgagcaggagcccacagccgagcagcggcccagagcag

SEQ ID NO: 243389 - RNA, 72 nt, Homo sapiens
ccccaggcccccaggagcagcaagcaaaacagcgccggccgggggaagcgggcaagaaggggggaaaacagc

SEQ ID NO: 243390 - RNA, 75 nt, Homo sapiens
aagaaaacgaagaggcaaagagaaaaacacacccagacggagaaccgcaggaaagaagccggaaccagacggacc

SEQ ID NO: 243391 - RNA, 75 nt, Homo sapiens
agaaaagaagaacagagcaaacagacggaagagggcacggaaggcgaaaaacaaaacacaggaacagcgcaccgc

SEQ ID NO: 243392 - RNA, 76 nt, Homo sapiens
acacaaagcaacgggacccaggccagcggaagccgccaccccaggcggaccaccacaacaagaagccgcgccacgc

SEQ ID NO: 243393 - RNA, 57 nt, Homo sapiens
aacgacagaggcgaagacaaaaaaagagcggaggcccaaaggacacgaacaagacac

SEQ ID NO: 243394 - RNA, 79 nt, Homo sapiens
cgagaaggagggccgacgccacaggccaacgaggaaccaaagggagaggaaagggcaacaggaaaacaacccagagaac

SEQ ID NO: 243395 - RNA, 71 nt, Homo sapiens
gcccccggcgccccggcccccgccccagcccgccggcggcggcgggaaagcggggcagcaaggcaaggaaa

SEQ ID NO: 243396 - RNA, 74 nt, Homo sapiens
ggaggcgaggcgacgggggaggccgagaaccgcagggacggccgagcccccagcaccggccgacaagacgccac

SEQ ID NO: 243397 - RNA, 76 nt, Homo sapiens
cagcgccgcgcgccgcgcgggcgggggcacccgaggaggaagagggcagggcccacggaaagaagggaaacccggg

SEQ ID NO: 243398 - RNA, 75 nt, Homo sapiens
ggcaggcggacccaggaggcagagaaaacgcgcacagggagcgagcacaaacgacacacgcaaaccacaaagccc

SEQ ID NO: 243399 - RNA, 70 nt, Homo sapiens
cccgagggcgggacacagcccaagacaaaagaagagaaacacaaccaggaggggacagaaaagagaaagg

SEQ ID NO: 243400 - RNA, 40 nt, Homo sapiens
gcagaccgggccgggccgccacagcaccccgccccacccc

SEQ ID NO: 243401 - RNA, 69 nt, Homo sapiens
ggaaaagggacgaggaagaagggcaggaccgggcggaggccgccaagacgcaaacggggacagcgccga

SEQ ID NO: 243402 - RNA, 64 nt, Homo sapiens
cccgaagcccccaaagagagaaccggagagcacccaacacccggccccgggcccgcacggccca

SEQ ID NO: 243403 - RNA, 59 nt, Homo sapiens
gcgggggcccgagaagccgacgggcccaacgcagccaggcaagaagacccggagcacac

SEQ ID NO: 243404 - RNA, 51 nt, Homo sapiens
gcaggagggagaacggaccaaaacaagaaggcagacaggagggcaagaaac

SEQ ID NO: 243405 - RNA, 84 nt, Homo sapiens
ggcagaccagcgccagcccacaggagagggcgcagcagaaaaagggacagggcaggcgaaggaacgaggaaaaacggaacggca

SEQ ID NO: 243406 - RNA, 78 nt, Homo sapiens
gaagaccaaacaaagccagccggaaaaccagagggccagacacacagcgaacgacagagaacaaccaccacgcggaga

SEQ ID NO: 243407 - RNA, 83 nt, Homo sapiens
cgacgccggggcaccgcaggggaccgcgaagcgcacccaccccgaagaacagaaaaagcagggcacaagacacgggaccacca

SEQ ID NO: 243408 - RNA, 102 nt, Homo sapiens
aaaagcgaaccgacgaggaagggaaggagcccagacagcggcagaaagaaagcccccgaggccagagacccgagacaacacagcacacacgccgcaaaaccc

SEQ ID NO: 243409 - RNA, 68 nt, Homo sapiens
gaggaacaaccaagccggaccacgccgcgaggcaaacgcaagggaaaaaagggcaggggaaagagaga

SEQ ID NO: 243410 - RNA, 76 nt, Homo sapiens
cccaagcaaacacaccaaccaagcaaaacccaagcaaaaccagagcagagaggagggacagaagaggaaacagcgg

SEQ ID NO: 243411 - RNA, 41 nt, Homo sapiens
agaaccaggacaaaaaggaagagaaacccagaaaacgccaa

SEQ ID NO: 243412 - RNA, 104 nt, Homo sapiens
aaaccacggaagcccggggccagagacacacaggaggcccgaggaaaagcaggaaggggaggagcacagaacgccaggaccaaaacagggagaaacacagccag

SEQ ID NO: 243413 - RNA, 72 nt, Homo sapiens
ccagccgcccgggcgcggccgggccgcggccccggcgcaagacccggaccgaagcggcgggcgacacggaag

SEQ ID NO: 243414 - RNA, 81 nt, Homo sapiens
gaaaacccaagacgccgcaaccaggacccagaagcaggccaacggaccacaccaaaagccaccaaaggaacacgccaggaa

SEQ ID NO: 243415 - RNA, 74 nt, Homo sapiens
aaaacacccacgggggaaccaccgaaggcaagcggagaacagccaccggaagaagccacagaaagcgcagaacc

SEQ ID NO: 243416 - RNA, 78 nt, Homo sapiens
ggacccaacacaaaggcccagcacgcacgccaagacgaggaggccagcaccacgcacagggacaaaggcaaggagaag

SEQ ID NO: 243417 - RNA, 87 nt, Homo sapiens
cgaagaggcagcgcgaggaggagccgaagcccaaaaagcgaaggggaggcgccgcaagcgcgaggcagccagaagagaaggccaagc

SEQ ID NO: 243418 - RNA, 78 nt, Homo sapiens
gacagaaagaaaggccaaagcagcagagcagaaacgaggcccagcagagagagaacagcgaggcaccacccacacgcc

SEQ ID NO: 243419 - RNA, 73 nt, Homo sapiens
gcgcgcgcggcgcgggacgcgcgcgggcacccacggagccccggggcggcaaaaacaaccaggcagagagaca

SEQ ID NO: 243420 - RNA, 82 nt, Homo sapiens
cggggaaaagggaaggaaaagagacgcaggcaggccggaaggaccaggcagggagcaggacaggaagcagaaggccaggaaa

SEQ ID NO: 243421 - RNA, 81 nt, Homo sapiens
aggcacccagcagccagcacggccaagcagccaccggacgggggaaaggaggccgagaagagcccacagcgggacgggcgc

SEQ ID NO: 243422 - RNA, 71 nt, Homo sapiens
gaacccgaggaacaccggggcagacgggaggaaaaaaaaaaggccaacaaaaagcacccccaaaggccgac

SEQ ID NO: 243423 - RNA, 82 nt, Homo sapiens
cccccagcacagcgccccaccccagcccccaacccccagagaccccaaaccaaaaggaagagaccaagccgaagcgcggccg

SEQ ID NO: 243424 - RNA, 73 nt, Homo sapiens
acacaggaacaggagcgcagaaaagggcccaacgcgcaggccacgggccggcggggaaacccaggcgaacagc

SEQ ID NO: 243425 - RNA, 84 nt, Homo sapiens
gcccgccggggcgccgcagcccccggggcccacggccgcccgccaccaggagacccaaagcaggcggaggacgggcaacaccca

SEQ ID NO: 243426 - RNA, 57 nt, Homo sapiens
ggaggcgcaaaggaccgggcaaagaaagacagaaagaccaccgaagagcagagaagg

SEQ ID NO: 243427 - RNA, 77 nt, Homo sapiens
gcgaaggcaagaagacaggaacgggacacacaaaccccaaccagggacaagaaggggaacaaagcagaagccagaaa

SEQ ID NO: 243428 - RNA, 73 nt, Homo sapiens
gaccaagaaccaggaccaaaccacccaggacacggagcagcgggagcccagacgccgcgggagcaaaagagaa

SEQ ID NO: 243429 - RNA, 78 nt, Homo sapiens
ccgcccccaccgccagcccaccacaacacaacaccccaccccaagcaacgaggaaccccagagaggacagaagccaac

SEQ ID NO: 243430 - RNA, 56 nt, Homo sapiens
acggacagccaggaaaagcagagaagacagagccaaagcagggaagagcccggagc

SEQ ID NO: 243431 - RNA, 81 nt, Homo sapiens
cagagcaaaggacaaggagaagaagaagaagaagagacacagacaggcgaagcaagcaggccgagaaggagggccagaagg

SEQ ID NO: 243432 - RNA, 73 nt, Homo sapiens
ggcggaagaggacgggcgccgccagaaagggacacagcgagagaggcagggacgagcagaaccagacaacgcg

SEQ ID NO: 243433 - RNA, 64 nt, Homo sapiens
agcgcaccagcacggcaggggagggaccccggccagcaagcggaacccaagaccccaaaaaagc

SEQ ID NO: 243434 - RNA, 75 nt, Homo sapiens
ccggccggagcgggaggcgggccagcgacaaaaagaggaaaacccccgagacaaacacagacccaaggaacgacc

SEQ ID NO: 243435 - RNA, 76 nt, Homo sapiens
caagccacgggccaaaggaaaacaccacaagaggacaaccggaaaggagcgccgcaggaggcacggacaaaacgca

SEQ ID NO: 243436 - RNA, 72 nt, Homo sapiens
gcccgcgccacagccaccagagccggcagcaaagagggaacagaagaacagagcgccgggacaggaaaccac

SEQ ID NO: 243437 - RNA, 51 nt, Homo sapiens
aggggaaagcccgggccaagcgggaggcgcccccacagcgcggcaccgacc

SEQ ID NO: 243438 - RNA, 79 nt, Homo sapiens
ccagcaagcgcaagaggagcggccggagcgggacggaaggggacacaggcaagaccacacggacgcacaacaggcaggc

SEQ ID NO: 243439 - RNA, 75 nt, Homo sapiens
cggggcccaccccaagccaggaaaagccggcacagaagagcaacaagcggaagaccacaacgacgggggcacgag

SEQ ID NO: 243440 - RNA, 52 nt, Homo sapiens
gggcgcagagcgggcaagggaagaacaaagggagcagggagaaaacaaggca

SEQ ID NO: 243441 - RNA, 76 nt, Homo sapiens
caaacggaggagccagacccggggaggcgcacacacaccaaaggccacgcagaacaaaagacgcacagagacggac

SEQ ID NO: 243442 - RNA, 101 nt, Homo sapiens
aaacccagaacacgggagaaaaaggaaaacgcggaaaaccgacacaacaggggagcgacagaaaagcagcacaacccccggagaaccgaagggacacagca

SEQ ID NO: 243443 - RNA, 71 nt, Homo sapiens
aaaccacacacagcaacaaaggagaaaggcgaggcaaacgacagcagaccacagcccggcaggcccaaaaa

SEQ ID NO: 243444 - RNA, 85 nt, Homo sapiens
gcgcgaagcccggcccccaggaacaggaggccgcgcccgggacccccccgccgccgccacagagcgccgccgccgccacgccgcc

SEQ ID NO: 243445 - RNA, 71 nt, Homo sapiens
gaccgggcggaggagcccccccgcaaccgaaggaggcacccagccacaccgaccaaagaacagaaaacacc

SEQ ID NO: 243446 - RNA, 79 nt, Homo sapiens
gaaggaccaagaaccagaaagggacgcggcacagaacgaagaagaaagcagaagcaagagaaaaaagaaacaccgagac

SEQ ID NO: 243447 - RNA, 59 nt, Homo sapiens
ggcacagcaccccccccaccacccggcagaaccggaaggccagggccacgcacccaggc

SEQ ID NO: 243448 - RNA, 82 nt, Homo sapiens
gggaggcggcccgggacaggggcaccggcccaggcgaagcaacccgaagagagaggagaaaaacaaccaccagcgagcaaaa

SEQ ID NO: 243449 - RNA, 84 nt, Homo sapiens
gcaggggaaggaacgggccgaaccgggagcgaggaaccagaacgaaaagcgccagaaaggcccgcagcccccggaagccaaaga

SEQ ID NO: 243450 - RNA, 62 nt, Homo sapiens
aacccaccggacgaacaaaacgaaggacaaccgccaacacaccaggagagaaagacaaagaa

SEQ ID NO: 243451 - RNA, 84 nt, Homo sapiens
agaaccgacccgggggacaaccgagaaaaagcgagccagccaggagcacaggggcgaaggaagggcagggccggacacggcgcg

SEQ ID NO: 243452 - RNA, 60 nt, Homo sapiens
ccacacagggcagaaggaagcacgacagcccgggcccgaccccaaaccccagggcccgga

SEQ ID NO: 243453 - RNA, 64 nt, Homo sapiens
aaaagagagagcgaggacagggaacgagaagaagaacccaggaacaacaaaaaacacagacaca

SEQ ID NO: 243454 - RNA, 110 nt, Homo sapiens
gccagacgggagcacaggaacgggccacacgcagccagagcgaaggccagaccggacggaaggggccaggccccccaaacagccaagagaaggcacgggccggcgccagg

SEQ ID NO: 243455 - RNA, 85 nt, Homo sapiens
cggacgcagccgccaccgagacgaggaggccacgcgcagccccggaagagccacccagacccaccccgggcggaaccccggccag

SEQ ID NO: 243456 - RNA, 80 nt, Homo sapiens
accgaggcggagggggagaacacccagacagccagcaggggcagaagcagcagacggaacgagggcaaagaaggcagggg

SEQ ID NO: 243457 - RNA, 57 nt, Homo sapiens
caagcagaaggagcgaagaagagagcgaccaagccagaagaacaaccagaaacaaac

SEQ ID NO: 243458 - RNA, 73 nt, Homo sapiens
caaggcaacacccgaagaaacaagcacaggcgacgagggcaaaacaccaggaccaacccaggcaacgcagacc

SEQ ID NO: 243459 - RNA, 66 nt, Homo sapiens
accaagaaccaggcacgaagacagccccaacagacgagaagcaaggaaggcaacaacgacaaaacc

SEQ ID NO: 243460 - RNA, 66 nt, Homo sapiens
caaggagccaccagcacggaccaggaggcgagcaacagagccccggggcccgcgcaaaaccaaccg

SEQ ID NO: 243461 - RNA, 69 nt, Homo sapiens
ggaagggggggaagaccccaggcgaccacaccagacacaggggaaaagaggcgccaggcaccacaccca

SEQ ID NO: 243462 - RNA, 84 nt, Homo sapiens
acacgggcgacggggcccagcagacagccgaggggagcgcggggcccggcagaaaggccacccagaggagaaggccaccccgcc

SEQ ID NO: 243463 - RNA, 76 nt, Homo sapiens
accgagagagacggagcacccaggacacacgaaaaggaggacaaaagaagaagaaaaaaccgcgacaaacgaaaga

SEQ ID NO: 243464 - RNA, 55 nt, Homo sapiens
cgcaaaaacagccggaaggggaccaagaaaggcccagggaccaaagcccggacaa

SEQ ID NO: 243465 - RNA, 81 nt, Homo sapiens
ccaggcgcggaccacgggggcgacggaccacaagacgcacccacaaagcaaaccagccccagaaaagaaaagaagcaggcc

SEQ ID NO: 243466 - RNA, 72 nt, Homo sapiens
agcgagggggggcgcgccggaaaccggagcgcgcagcaggcggccgggcaaagggcagcacccggaagagga

SEQ ID NO: 243467 - RNA, 31 nt, Homo sapiens
agaaaaacagaggacagaccgccacaggccg

SEQ ID NO: 243468 - RNA, 76 nt, Homo sapiens
cacgagagaacggcacacgcgagcgaccagcccaccgcacccagggaaaaaacagcagccacacgaagccgggggc

SEQ ID NO: 243469 - RNA, 58 nt, Homo sapiens
caacagagcagcagcacgggcagcagagccacgccgggccagaaaaggggaagaaaga

SEQ ID NO: 243470 - RNA, 65 nt, Homo sapiens
agaaaaaccgaacggcagagagaacacgacaagcacagcaaaaccaaagcagaaagcgcaacgga

SEQ ID NO: 243471 - RNA, 66 nt, Homo sapiens
gccacggcaggaagaccgggagggaggaaccaacaacaggacaaagaggccaggagacacgccacc

SEQ ID NO: 243472 - RNA, 83 nt, Homo sapiens
ccaccagcccaaggagagggacggggaagacagcaggaggggaccaccaggaagagcgaggagaaacgaaaagaacaggaaga

SEQ ID NO: 243473 - RNA, 76 nt, Homo sapiens
cccccggagcccaacggcgggagcggaaaggacgaagaaaggagggcaggggaaggggaggaaggcaaacgaggca

SEQ ID NO: 243474 - RNA, 87 nt, Homo sapiens
agacggccccaaaaaaaacaaagacagagggagaggaacaaaagaagagaggcagccgcacagcccagccaccccaagcaccacccg

SEQ ID NO: 243475 - RNA, 79 nt, Homo sapiens
agaaggcacagcggcgaccgacgccgcgagcgcgccagccggcccggccggacgaaagaagcaccaggggccggcaggg

SEQ ID NO: 243476 - RNA, 79 nt, Homo sapiens
caacacgaccacaagccacaggcacccagggaagagcgggccaacagaacaagcgcgagaaggaacaaaccaggagaaa

SEQ ID NO: 243477 - RNA, 76 nt, Homo sapiens
aggacagcagggaggcgggacgcggggaggccaagggaggacaccaggcccagcacgagagagcgacgacagcggg

SEQ ID NO: 243478 - RNA, 63 nt, Homo sapiens
cggcgcccgcgccacagccaccagagccggcagcaaagagggaacagggaagaaaagggaacc

SEQ ID NO: 243479 - RNA, 76 nt, Homo sapiens
ccaggcggggcgccgaaacagagcagaagagcgggcgggccagaaggccacccaaacagagccaggccgagacaaa

SEQ ID NO: 243480 - RNA, 35 nt, Homo sapiens
gggaagagacagccaaggccgacggagaccgcccc

SEQ ID NO: 243481 - RNA, 77 nt, Homo sapiens
cggccaccggccccacacgaccgcagcccaccacccaggacaacaggaccagacaagggaccaggccacacaaccac

SEQ ID NO: 243482 - RNA, 77 nt, Homo sapiens
gacgacagagacgaaaaaccgaggcgagacccaaagacagaagcgaaggggacagggggagaaccgccagggaaacc

SEQ ID NO: 243483 - RNA, 80 nt, Homo sapiens
ccgccaacgaagaccgagaccagaggagagagacgacgacgagacgaggagacagacgagaccacccgggaggagggggc

SEQ ID NO: 243484 - RNA, 84 nt, Homo sapiens
agggcacgcagcaagcaaacagcagcgcaagggcagcagaacaggcccagaagccccacaccaacagcaggcagcacagaacag

SEQ ID NO: 243485 - RNA, 72 nt, Homo sapiens
cgcgaaaaaaaagcccaggaagggaaagcaagacaggaaagaaagacaaaaagcaaccaagggcagagcaaa

SEQ ID NO: 243486 - RNA, 51 nt, Homo sapiens
cccagccggagacggagaggaacgagccagagggagaggcaagcccaaagc

SEQ ID NO: 243487 - RNA, 80 nt, Homo sapiens
ggcccccgccccgggccaccgcggaccccccgcgcaggaggcggccagcggggagacaacagccacacaaagcagcaaca

SEQ ID NO: 243488 - RNA, 72 nt, Homo sapiens
gcaccaccgcccgagcacccaaaggaagacaccgccccgggaagacggccgaccagagaagcacagcggcca

SEQ ID NO: 243489 - RNA, 80 nt, Homo sapiens
cggggagcgccggagcagcggacccaggcagaggaaccagccaggaagaggaacagagccccggcacggccggggagccg

SEQ ID NO: 243490 - RNA, 76 nt, Homo sapiens
cccacgcagagggcggagcggcagcccacgacacgcccccaccccaacaggaaagacgaagcggcggagagggggg

SEQ ID NO: 243491 - RNA, 78 nt, Homo sapiens
ggccgaggcgcacccccaggagggcgacaaggagcccagcacccagggcagaaagcagccagagacgcgcacgaaacg

SEQ ID NO: 243492 - RNA, 58 nt, Homo sapiens
ccccggcccacaggggggggcaaacccgagagaacggaaacagacgcacgccgaaaaa

SEQ ID NO: 243493 - RNA, 82 nt, Homo sapiens
ggcaaagccccccagaagaccaggcagaggggaggagacacgaagcgacgcagagccagaagggaggcagggaacacgcgga

SEQ ID NO: 243494 - RNA, 78 nt, Homo sapiens
cgggaggggcaagccagccaccgggaccccaggcggcaggccgagggacagggaaaacgccccccagcagaaagcgga

SEQ ID NO: 243495 - RNA, 81 nt, Homo sapiens
cgccccaccaccgcgaggggcgggcgaggcaccggagacccgagcaccccaacgggcaggaccacaaaacaaaccacccaa

SEQ ID NO: 243496 - RNA, 71 nt, Homo sapiens
cccagcgggccgacagagaaggccaccaaggacagggcagcaaggaaccaaaccgaggaaggaaacgacag

SEQ ID NO: 243497 - RNA, 41 nt, Homo sapiens
acggcgcccggcaaggacaaggggcaagaagaagaagcaga

SEQ ID NO: 243498 - RNA, 76 nt, Homo sapiens
cgccgggcacaagaagaagggggaagccagagggaccccagcgggcggacgggggacagacacaccagcgaggggg

SEQ ID NO: 243499 - RNA, 73 nt, Homo sapiens
ggacaagagaaggaccgaacaccaaaaaagcaagaaaagccaggcccgagccggaagagacgcagaagaacga

SEQ ID NO: 243500 - RNA, 69 nt, Homo sapiens
ggcgcagagcaagccgacgagaagcaagaacagcgcaaggcaagcacaaaccacagcaccgagagcggc

SEQ ID NO: 243501 - RNA, 57 nt, Homo sapiens
ggaaggagggcccgggcccaaggaggagacaaggccgacgcgcacgaacacgggggc

SEQ ID NO: 243502 - RNA, 33 nt, Homo sapiens
ggcagcggaaggggccggcgaaccaacccaccg

SEQ ID NO: 243503 - RNA, 59 nt, Homo sapiens
agagggcaccagccaccaggcgccggggaccaggccaccgcgaccgaggccaacacggg

SEQ ID NO: 243504 - RNA, 82 nt, Homo sapiens
cccgagcgcggagcagcgaccagagagcgcggccggaggacaggcccccacagagagcacacaaacaaagcgaaaccacgga

SEQ ID NO: 243505 - RNA, 78 nt, Homo sapiens
gaaagggccaaaggcagaggccacgcccacaccaaacagaggaggggaaccaacggagccgaccacagaagaaggcgg

SEQ ID NO: 243506 - RNA, 54 nt, Homo sapiens
agcagcacgcgaggaggaaaggcaccccaccagggagcagagcaagaacgggac

SEQ ID NO: 243507 - RNA, 72 nt, Homo sapiens
agccagaagcccccccagcagggaacccacaggagggccagaggacaaagcacggcggaagagaagccagcc

SEQ ID NO: 243508 - RNA, 80 nt, Homo sapiens
gaaggagcaaccgcccggcacagcccacagggagaaagagcagaaacaacgaagcaagcccaagggcgcaggggcaacac

SEQ ID NO: 243509 - RNA, 79 nt, Homo sapiens
accagccgacaaagagggggcccaagaagggcacacaggcccgagcacaaacacaagaaacgcacgcccgccagcgaga

SEQ ID NO: 243510 - RNA, 81 nt, Homo sapiens
accccgcggacgagcagagcaaaggaacaaccaaggacacagagaagcccggggcaagaacggggcggacagcggcggcaa

SEQ ID NO: 243511 - RNA, 77 nt, Homo sapiens
accgacaacccccggagacaacaaccgcgggcacccacggaaaaggagaagcagagaaccccagacacagagcgaaa

SEQ ID NO: 243512 - RNA, 66 nt, Homo sapiens
agggggaaaaggagcgcaaagcgcaaagaagccggcagcacagccagaaggcgaccggcccgagga

SEQ ID NO: 243513 - RNA, 65 nt, Homo sapiens
caggggggaccagacgcgcgggcggccagcccgccagcaaggagaccacaggggagacggagaag

SEQ ID NO: 243514 - RNA, 64 nt, Homo sapiens
aaacccaggacagagcacacagacgacacaccacagggggacagccagaccccaccgagccccc

SEQ ID NO: 243515 - RNA, 78 nt, Homo sapiens
cagaagcacagaaaacaggagaccgaagggcccgcagcccagaacgcaggagaaaccacacccgcccaaacgcacgca

SEQ ID NO: 243516 - RNA, 78 nt, Homo sapiens
ccgaggagcccgaccacccacagcaacacagaaggcaaagggagggaacaaccgaaaaggaaccggaagcagcagagg

SEQ ID NO: 243517 - RNA, 77 nt, Homo sapiens
gggaacgcaggacccaaagcaaaacgccagggagaagaagagaagacaggagacaaacgggaaagcaaacccccaag

SEQ ID NO: 243518 - RNA, 68 nt, Homo sapiens
gaggacaggagacgaccgagcagaacccccgaacagaacggcccccgaaggagaacacacagcagagc

SEQ ID NO: 243519 - RNA, 77 nt, Homo sapiens
gacggcacccgggggccacacgcaggccccgcgccagggacaaaccggcgaccacacacggggacgacggggaagcc

SEQ ID NO: 243520 - RNA, 70 nt, Homo sapiens
caggaagcaggcgagcagccaaggaccccacaaccaggaccagcggagaaacaacaggaacccccaaaac

SEQ ID NO: 243521 - RNA, 77 nt, Homo sapiens
gagaggaagaccgaaggacaagaaaaagcggggaaggggggcaaaaaaaagaagcaagcgaagcaccgagcacccac

SEQ ID NO: 243522 - RNA, 71 nt, Homo sapiens
aaggaagcccagagcaggaaaggaggccggaccgaggaaccaccaagaggcaacagaaacgagaagaacga

SEQ ID NO: 243523 - RNA, 101 nt, Homo sapiens
ggagcgggcgcggccagcggaccgggcgccggggcacgaccacacgccggagcgcgcgagcccagcaaaaagaggagaagcacccccccagaagaaaagag

SEQ ID NO: 243524 - RNA, 70 nt, Homo sapiens
ccagcccggcggacaaggagaagaaacgcaaaagaccaagaccaggaacgaggcaccggacacagggcac

SEQ ID NO: 243525 - RNA, 76 nt, Homo sapiens
cccagaagacagagggcgagaggacacgagcccagccaggcgagccagcgccaaagaaaaagaacaagaggagcca

SEQ ID NO: 243526 - RNA, 79 nt, Homo sapiens
ccggggcgccacgggggccagaagcagccaaagagaagcaggagaaggaacgggaaaagaccaaaaaaccaggccagag

SEQ ID NO: 243527 - RNA, 80 nt, Homo sapiens
agcgggcagccgccgccaccccgcggccgcacccccgccccagggagacccgaccaccggaagccacggcccggaccccc

SEQ ID NO: 243528 - RNA, 74 nt, Homo sapiens
agagcgggaagaggggcgagcggcgcgagggcggcccgcagaagagcacagaaggagaaggccagcaaagcgga

SEQ ID NO: 243529 - RNA, 70 nt, Homo sapiens
acggaaagaccaacggagacaaaacagccaggagagacaagcccagcgcgcacgggcccggaagaggcgg

SEQ ID NO: 243530 - RNA, 77 nt, Homo sapiens
ccaggccgcccagcagccgcgccagccaggaacgagaggaggcccgaaggcaggagaaaggaagacaggggaaccag

SEQ ID NO: 243531 - RNA, 80 nt, Homo sapiens
ggagaccagaagagaaccgagcagcccgacggccaggaggcgaagagacgaggaagcccaggagcccgaacacaaaaaga

SEQ ID NO: 243532 - RNA, 68 nt, Homo sapiens
cgagggaggaagagaacacccaccggcacaacacacaaagccaccagggagaagaggagaccacccca

SEQ ID NO: 243533 - RNA, 82 nt, Homo sapiens
aacgagagcggacagaacccagaagccccgggggaaaggaagagcaagacaaaccaagaaccagacggggccagagaagaag

SEQ ID NO: 243534 - RNA, 56 nt, Homo sapiens
cacccacggcaaaaagacggaaacgacagaagcaaaacggaccaaggggccaggcg

SEQ ID NO: 243535 - RNA, 82 nt, Homo sapiens
gagcgcccgggggagaaggccgagggccgggagcccgcaccgggccggcaggagcagaagacagagggaggagggccacgga

SEQ ID NO: 243536 - RNA, 82 nt, Homo sapiens
gaaaacacaggagaagaaagagagagggggaacaaaggccaacccaaaacccaaaccaggggccgacagaaaaagaagagga

SEQ ID NO: 243537 - RNA, 90 nt, Homo sapiens
cccccgggcaggacccggacccggaagagaagagggggcaagaaagggggagaggcaccagcaacagaccaaccgcagcaagcacagaga

SEQ ID NO: 243538 - RNA, 82 nt, Homo sapiens
cagaaccgcggcagggcacgagacacccagcaaccagggcacggcgccagcccccagggaggaggcccggggaccagaagag

SEQ ID NO: 243539 - RNA, 83 nt, Homo sapiens
gagcgccccgccacgcgcacagcagccgcaccggccaacgagaagaacaggagaaccgccagcaagagccccagacaggagca

SEQ ID NO: 243540 - RNA, 58 nt, Homo sapiens
caagaccagagccgggaccccagccaggccgaaagaagaaaacccgagcagagaaaac

SEQ ID NO: 243541 - RNA, 77 nt, Homo sapiens
acccgccgcgcccggcacgcggcaaggagcccgggaagagacgccgggagcgacccccgagcccccagccggacccc

SEQ ID NO: 243542 - RNA, 52 nt, Homo sapiens
caacaagcggcgccccggggcgcggcccgggcacagcacgggagccggaggc

SEQ ID NO: 243543 - RNA, 108 nt, Homo sapiens
gcgccggccggagaaggccagagcacacacggccaagagcgggcaccaggaagcgaaggcgaacaccccaccagaccacccagcaagcccacaaaaaaggcacaagca

SEQ ID NO: 243544 - RNA, 81 nt, Homo sapiens
cggaggcgggcggccagcgcgcaaacccgccccccagcccccggggagcggggccagggacaagggggccgaggagccacg

SEQ ID NO: 243545 - RNA, 73 nt, Homo sapiens
aagcaccacgaaaggaggcacagaaaaggaccacacagacaaagccgaaaacacaggcagcgacacacagagg

SEQ ID NO: 243546 - RNA, 77 nt, Homo sapiens
ccggacccgcccagcagaagaagagaggagggagaacacagaaaccggccccagacgagaacacacaagaaaaaccc

SEQ ID NO: 243547 - RNA, 69 nt, Homo sapiens
agagccaccaggcccgggaaggggaaccgaaggaaagagagcgggaaaacggcacaaggcgacgaggga

SEQ ID NO: 243548 - RNA, 78 nt, Homo sapiens
cgagggggcaccgagcgaggcggagagacacccaaagggggagccaggcgggaggggcgaacggggaagacaggccga

SEQ ID NO: 243549 - RNA, 68 nt, Homo sapiens
aagggagcccaagaggaccagacaccgaaaacgagaaacgaaagagacacgggggcacaaccgagccc

SEQ ID NO: 243550 - RNA, 74 nt, Homo sapiens
gacagcaaaaccccagcggcagaacgcacagagggagagcagggggagaaagggcagaaaggcggaagccaaag

SEQ ID NO: 243551 - RNA, 63 nt, Homo sapiens
cacaacaagccaaagaagaaggaaagaaggaccaggaagggggggaagcaaaaggacgacgaa

SEQ ID NO: 243552 - RNA, 75 nt, Homo sapiens
gaacagccaggggcccacggagccacaggaaaaggccgagacaggcaaccagacggagggaacaaacagggacaa

SEQ ID NO: 243553 - RNA, 74 nt, Homo sapiens
aggccacggcaagccgacgccagagccacagacccaacagcacaagccacaggcaagaacaaagggcaaaggac

SEQ ID NO: 243554 - RNA, 77 nt, Homo sapiens
gaccgcagccaggccgacccgaccggaccagacaaggaacaaacacccaaagcagccaggagccagcaaaaagaaga

SEQ ID NO: 243555 - RNA, 59 nt, Homo sapiens
agaggacaagacaggacgccaggacagagcgggagccaccagcgccaaagggaagccag

SEQ ID NO: 243556 - RNA, 71 nt, Homo sapiens
gaacccgaaacgcaaacagccacccgaacaccaaccacaacaaccgcaaacgaagaacccccagagcagca

SEQ ID NO: 243557 - RNA, 74 nt, Homo sapiens
aaagccagcgggggagcacacgacgggacccacgagggacgcccccgcggccgcacccccagaccacaacacac

SEQ ID NO: 243558 - RNA, 32 nt, Homo sapiens
agccaccccgccaagaaccagacgccgggccc

SEQ ID NO: 243559 - RNA, 74 nt, Homo sapiens
cccgcagccccgccagccacccccaggcggcgagccaaggggaaaggagcaagaagacacccacaggaagagag

SEQ ID NO: 243560 - RNA, 68 nt, Homo sapiens
gaccagaacaggggagaaaaaaagaggagaacagaagcggagaacacaaagccacaagccaaacccaa

SEQ ID NO: 243561 - RNA, 79 nt, Homo sapiens
agcaggaggccaggccgccagcccgggccggggggggcgacccaccgcacggcccagcccgagccccgaaggacaaccg

SEQ ID NO: 243562 - RNA, 75 nt, Homo sapiens
ccaagacgggacagagggcggacggaggaacaggaacaggagcagccgcaaaccgagagagagagaaccaaacac

SEQ ID NO: 243563 - RNA, 69 nt, Homo sapiens
cccaaaggggaagacagggacggaccacgggaccaagcagacaaaccaaggagcaaaacacaacccaga

SEQ ID NO: 243564 - RNA, 76 nt, Homo sapiens
cccgggccaccgccaccagcccgccgacacagccaccaagaaggcacaagcagaacgggaaaaggggcggaaagac

SEQ ID NO: 243565 - RNA, 74 nt, Homo sapiens
acaggggacaggcccacgccagacacgacgcggcaggaacccggcccagaggggagaagcagaccgcaccaggc

SEQ ID NO: 243566 - RNA, 69 nt, Homo sapiens
gggcgccgcccccccggcccccgggacggcccaaggccagcccgcagaaaagcaccaggaagacagccc

SEQ ID NO: 243567 - RNA, 68 nt, Homo sapiens
ggaaccgggggaaagggagccagcgccccagaacagcacgggcagaggaaggccagcccagaacaacc

SEQ ID NO: 243568 - RNA, 82 nt, Homo sapiens
cgacaccgcggagcaaggaaaagacccggaaagaagagacacagaggagccacacccccagagcggaaaacgccagcggaca

SEQ ID NO: 243569 - RNA, 57 nt, Homo sapiens
agagcggggcccagggaaaaggcgcccaagaagccaaaagggaagcacgagaagcag

SEQ ID NO: 243570 - RNA, 66 nt, Homo sapiens
gacaccccgggcacgccacgccccaagaaacacacccgggacggaggcccaggcgcaagaaaccaa

SEQ ID NO: 243571 - RNA, 58 nt, Homo sapiens
cagaccaaccagaagccagcccgacagacagaggagagcggaccaagggagaacagaa

SEQ ID NO: 243572 - RNA, 70 nt, Homo sapiens
caaaacaggcacacaagaaacagggagcgcgaaccaccaagcgggccaaaagcagagaaccaaagaacac

SEQ ID NO: 243573 - RNA, 67 nt, Homo sapiens
aaccccccaccagcgccaagaggcaaagcagaagacgcaagggcacgcgaccgacgggaacaagaga

SEQ ID NO: 243574 - RNA, 71 nt, Homo sapiens
gaacaacaaaaaaaaccccagaggaacagcagcccaaacaagcaccaacccgccccagcaaaccaccccaa

SEQ ID NO: 243575 - RNA, 69 nt, Homo sapiens
accccggcgaacagcaaggcacaagcagacgacagagagagggggaagggccaaaagaggaagaggcgg

SEQ ID NO: 243576 - RNA, 83 nt, Homo sapiens
ggggccggcggccacggccggaaggcagcaagccagaacggccgagcgaccaggagaggagcccccgcccgaagaccggggag

SEQ ID NO: 243577 - RNA, 81 nt, Homo sapiens
ggccgaccacccggaaaggcccgcagcccccggaagccaaagacccccagggacccggccccagcaccgccgggagcgcgc

SEQ ID NO: 243578 - RNA, 86 nt, Homo sapiens
gccccgggcccgcccccggccagcccccacaacggggaccaccgccccagcagacgcggaaggaccgcagcgaagcacagcagaag

SEQ ID NO: 243579 - RNA, 76 nt, Homo sapiens
gacaccaagggacgcagcggaagaaaagaaagagagggcgccaggagcaggcagggcacgaccagacacgcagccc

SEQ ID NO: 243580 - RNA, 73 nt, Homo sapiens
agaaacccggcaaaccgacgcgaagacccgagagagaaccgaggaggcgcaaaggggaagaaagacccaacca

SEQ ID NO: 243581 - RNA, 70 nt, Homo sapiens
cagcgagaacaaaggagagaggaccacccagaggagcaacaggaacccaagaccagggacgggcaaaaac

SEQ ID NO: 243582 - RNA, 67 nt, Homo sapiens
ggagacacaccccaccagggcaacaggacacaaggcagcgcgcaggaaaggagaaaagaagaacagg

SEQ ID NO: 243583 - RNA, 76 nt, Homo sapiens
ggcccgcgaacgcagcccaagacggcaggggacgacagagaccaagagcacgccgcccaacaggaaaccaggcccc

SEQ ID NO: 243584 - RNA, 59 nt, Homo sapiens
gccgaaagaaacgagagggagcacagcgcggaagccccgaggcagccccgcggaggagc

SEQ ID NO: 243585 - RNA, 51 nt, Homo sapiens
acgggacagagcgacagagggagcacggcccaggcagccaagaaggcagag

SEQ ID NO: 243586 - RNA, 68 nt, Homo sapiens
cccaacgccaagaaaccacaagagaaaagacaacacacggagaagaaggaaccccgaggggcgcagca

SEQ ID NO: 243587 - RNA, 72 nt, Homo sapiens
gcaccgccccaggacaaaaggggaaggcagacggaacaagacccgcggagaaccacgaaggacccacagggg

SEQ ID NO: 243588 - RNA, 70 nt, Homo sapiens
cagacagaacacaagggaaccgaagagaccgaggaaaaaagacagaccagaagagaggacacagcagcca

SEQ ID NO: 243589 - RNA, 76 nt, Homo sapiens
cacaggaggagggccagcaagcacaaaaagcaggcagcacgagggaccagcccaggcagcagcggaagccagaacc

SEQ ID NO: 243590 - RNA, 77 nt, Homo sapiens
ggccgaaccgggagcgaggaaccagaacgaaaagcgccagaaaggaggcagccggaagggacagagaagcaccaaac

SEQ ID NO: 243591 - RNA, 65 nt, Homo sapiens
ggcagcccgggacgggaagggacgccaggaggcggggaccccaaagacagccggaagccaagccg

SEQ ID NO: 243592 - RNA, 80 nt, Homo sapiens
cacgaggccagggaaaaggagcccaaaaaccggagaaggagaggcgggggaagggaaagaaaccagagacacacagacca

SEQ ID NO: 243593 - RNA, 81 nt, Homo sapiens
aaaggacgggaacaaagcgaaacagcacacggaaaaagagcgaaaaacggagcccagggagggccgcggggagagaagagg

SEQ ID NO: 243594 - RNA, 93 nt, Homo sapiens
caccccgccccaaggagcgcggcagaagacaagccgcccagcccaccgcaaggacgacgaggccagagacaaccaggggaccgcaggcgcacc

SEQ ID NO: 243595 - RNA, 78 nt, Homo sapiens
gaagaccaacagcagacagcgccacagaaccagcagcaaagaagcacgaaagggcacaacacagaagaaggcggggca

SEQ ID NO: 243596 - RNA, 79 nt, Homo sapiens
agagaaggaggagagagaggccgagcagggaaaaagaagaccggcaagggacaggaagcgcgagccggacacaagaggg

SEQ ID NO: 243597 - RNA, 85 nt, Homo sapiens
agcccgccacgccaggccggacccggaccgcagaagcccgggaccgggagcccgggaccgggagccggggggccaccccgaccgg

SEQ ID NO: 243598 - RNA, 79 nt, Homo sapiens
aagcggacgcgggacggaagcacacgcggcgaaaaaggcacaaacccagcacagagaagacggcgacaagcaaaagacg

SEQ ID NO: 243599 - RNA, 74 nt, Homo sapiens
ggccacccccgccgcagaacacagggcaaacgaagaaaacgacccagccagaggacaaaggaccgaggacaggg

SEQ ID NO: 243600 - RNA, 31 nt, Homo sapiens
acggcgggcgaaacaggggaagaggaccaac

SEQ ID NO: 243601 - RNA, 71 nt, Homo sapiens
aagccgcgcagcggaccagaaacccaaacgcaccaacaggagaaggacggagaagcgaaagccagaccggc

SEQ ID NO: 243602 - RNA, 71 nt, Homo sapiens
gcaaacggaccagaaacaaccaaaagaaaaccagcgcaaaaaggcggaggacccacaggagaggcacagga

SEQ ID NO: 243603 - RNA, 79 nt, Homo sapiens
cgagcaacagacgagcgcgccaggccgacagccgcggccgggcccgagaggggaaagaaccagacgacaggaaggcaca

SEQ ID NO: 243604 - RNA, 81 nt, Homo sapiens
ggacggagcgaaccgcaccagaggcagaagcagcccggcagggcggggccaaggagggagcaacaacaaggagcaagcaca

SEQ ID NO: 243605 - RNA, 78 nt, Homo sapiens
ggacgaccggccacgcgcaccagagcagggcccccgagaaacaccggggccaggggaacgcgaccaggcgggaaaagc

SEQ ID NO: 243606 - RNA, 43 nt, Homo sapiens
ggggacgcggggacaccacaagcacggcggaggcaggacggac

SEQ ID NO: 243607 - RNA, 80 nt, Homo sapiens
gcgggcggcgcgggggagaggggacaaacgagaggagccggagagaaaaagagaaggaaaaaccagacaagccagagcca

SEQ ID NO: 243608 - RNA, 99 nt, Homo sapiens
gaccgcgccgccccgcgagcacagagcccgccgccgaccgccgcccgccacacccgccgccagggccaaccgccccccagcagcaggcacgggcgaacc

SEQ ID NO: 243609 - RNA, 74 nt, Homo sapiens
ggagaaaagcaaacaaacgggggacaacccaagagaagaagcgcgagccaggggagggccaaaagggacaccga

SEQ ID NO: 243610 - RNA, 54 nt, Homo sapiens
acagcggggccacccagaacaaaaagggccagacacaggccgaacggcgaagac

SEQ ID NO: 243611 - RNA, 80 nt, Homo sapiens
cccaggccccaccgccaggagagacagagcggccagcgccagcgggagaacgacaccagggcccgcaaggcagagacacc

SEQ ID NO: 243612 - RNA, 110 nt, Homo sapiens
aagagggcacgaaggaaccacgggagacaccaaaagaggagaagccgcagggagagcagagcgacacgaaaagacagaccgacaacagcccagaagaagccaggaggacc

SEQ ID NO: 243613 - RNA, 75 nt, Homo sapiens
gcggcgccgcgccccggccgcacgggaagacccgcggaaggcacacaagacacagccaacaccgaaccgaaacca

SEQ ID NO: 243614 - RNA, 72 nt, Homo sapiens
accgaaaacagaaggaaagaaggaacggagaaggcaaagaagggggcggggaagagacacagaagggaggcg

SEQ ID NO: 243615 - RNA, 73 nt, Homo sapiens
gacgcaccgcccagcaaccgcagaccaagcggccacagacccccagcgccgaggaaaagcaacggcgcaagag

SEQ ID NO: 243616 - RNA, 72 nt, Homo sapiens
ggcgcacggagacccgccggcaaagaccggagacccgaaagaggaagagcgccgcaacccaaaaaccaaacg

SEQ ID NO: 243617 - RNA, 118 nt, Homo sapiens
agagaggaaacaaagaacccgcaaccagcagaagaaaggacggagaccgcccaagccccaaggcacagaggggaagaacgcacccacaccgaaccaagagagaagccggagccaggaa

SEQ ID NO: 243618 - RNA, 73 nt, Homo sapiens
gcagaagccgaacggccgaagaaagaagcaggaaagccagcgacgaaggaggggacgaacaagaacagaaagg

SEQ ID NO: 243619 - RNA, 85 nt, Homo sapiens
cgacccggcccggggcgcgccgggagccaggccggcacggcagcaagagaacccccccagagccccgggacgaggaaggaccggc

SEQ ID NO: 243620 - RNA, 64 nt, Homo sapiens
gggacaccagaagagacaccggaaacaggcgggcgcggacggcaggggcgccggggaacccgcg

SEQ ID NO: 243621 - RNA, 72 nt, Homo sapiens
acagaccaaggagagaaggccaacacggaggcgcgcggagaaaggaaaccaccggcacggcagcgggaaaca

SEQ ID NO: 243622 - RNA, 77 nt, Homo sapiens
agaccaccccacaccgcagccacacccagggaagcaccgggcacaagacgaagacccccgacgcccagcccgaggcg

SEQ ID NO: 243623 - RNA, 70 nt, Homo sapiens
gccggagcagaggaagaaccaaaggagaccaaaaagcagcaggaggcagagaacaaggcaaagaggcagg

SEQ ID NO: 243624 - RNA, 50 nt, Homo sapiens
gcacagccaccagccagcaagcccaagccaggagcgggggcagaagaacc

SEQ ID NO: 243625 - RNA, 82 nt, Homo sapiens
cgagcgcgcagcagccccgaagggaggacggcggggggcccgcggccacgcccccggccacgacacaggacagcgccagccc

SEQ ID NO: 243626 - RNA, 45 nt, Homo sapiens
ggcgaacaccccaccacgcccgggaggagcggggacacgaggacc

SEQ ID NO: 243627 - RNA, 74 nt, Homo sapiens
cggcgcaggggccagccaaggcaccacacagcgccacgcagagccccgccaggaagacacgccggggaacgaag

SEQ ID NO: 243628 - RNA, 81 nt, Homo sapiens
cagccgcggagcgacggagagccagaggaaaccccggggcagcggggggcgaagaggcggcccccaaccaagggaacaagc

SEQ ID NO: 243629 - RNA, 91 nt, Homo sapiens
gagcgccaggaggaggaagaccgaccgccgccgcgcaccgcgcacacgcagccagaagcaacaagagaagcagaaaaacagacacgcaaga

SEQ ID NO: 243630 - RNA, 71 nt, Homo sapiens
cgagcacaaacggggcggggccggggaacacacagaaagaaagccaagcacacacgaagacgcccgccaca

SEQ ID NO: 243631 - RNA, 68 nt, Homo sapiens
gcgcagaagaagcacccagcaagcgagggaccgggacgccacagccaggaggacagcaagacgacccg

SEQ ID NO: 243632 - RNA, 76 nt, Homo sapiens
ggaaacagccacgagagacgagcaacccccgggaagccaagccgcaggaaaccccccaggcaagaggcgcaggacc

SEQ ID NO: 243633 - RNA, 75 nt, Homo sapiens
agcaccgagcgggggagggggccccacgagccggaagagagagagaagaagaaggaggccgcggccagaaaccca

SEQ ID NO: 243634 - RNA, 71 nt, Homo sapiens
cccccgcccccccggcgaagcgggggaccccccccaaagcaacgcaccaagaagagcagaaacggaagccc

SEQ ID NO: 243635 - RNA, 78 nt, Homo sapiens
gcggaagcccgccccagagcagacagggaggccgcacagaggaggagcaccaaaccgagggagggcagccacaccaca

SEQ ID NO: 243636 - RNA, 85 nt, Homo sapiens
cacagccacaagaagaaagaacaaaggaaaaaccaagccaggggaaggaaaacaggggaacacagggccacccaggccgcggagg

SEQ ID NO: 243637 - RNA, 81 nt, Homo sapiens
aagagcgcggaacgcgagacggcaagcaggaaacggaggacggggaaaaaggaccacaagccacgaagaagagccggaaca

SEQ ID NO: 243638 - RNA, 63 nt, Homo sapiens
gaccgcgcggaccagggcgacaaagggacccgggcaaggaccccccaagcagagcccggggag

SEQ ID NO: 243639 - RNA, 98 nt, Homo sapiens
aagacgagaccaaagaggaacacaaacggcgcacaggagagggaagaccagaccgccgacccagcggacgccaagaagaaaggcccagaagcggagga

SEQ ID NO: 243640 - RNA, 86 nt, Homo sapiens
aagaagcagaggaggcccacaggcccgcccggacaccgagggaccaagaaaggcccagggaccaaagcccggacaaggcccgagca

SEQ ID NO: 243641 - RNA, 78 nt, Homo sapiens
ggcgcccccccagcgggcggagggacaaccagacggaaaacccggacggggcgcaccacacaagggccccagggcccc

SEQ ID NO: 243642 - RNA, 76 nt, Homo sapiens
ccacgagaccggaaagcaccacaaaaaggaaagcgccaggcaagaacgccccggcaaggacggaggcaggcaccac

SEQ ID NO: 243643 - RNA, 82 nt, Homo sapiens
gacaacagagggcgaacaccgggaaggaaggcacggagccggacaacaaaacgggggacaggagccagagaaaaaacgacgg

SEQ ID NO: 243644 - RNA, 69 nt, Homo sapiens
accaccggccccgggccagcggaagcccgagcaggacacgggacccaggccacgggccggggcccccac

SEQ ID NO: 243645 - RNA, 58 nt, Homo sapiens
gaaagaacacgaacacacacaaccaccagacagggccccggcccgcccggaagcgcag

SEQ ID NO: 243646 - RNA, 76 nt, Homo sapiens
ccggcgcggacccgccaccggaggagagaaggacggagaagcgaaagccagaccggcaagagcggaagaaagcacc

SEQ ID NO: 243647 - RNA, 73 nt, Homo sapiens
ccacagagggggaaagccaaggaaaaacggagagccacaaaaaaggaagcgaaacagcagccgcccaaaacac

SEQ ID NO: 243648 - RNA, 75 nt, Homo sapiens
gcccccggcgccgcgcgggcccgcagggagcgccgccagcagggccacgggaaacaggcacagaggcgggaagag

SEQ ID NO: 243649 - RNA, 82 nt, Homo sapiens
aaaagacgcgaggggccgcagcgggccggagagacaagccgagaccaccaggagcagagcggaggcaaccagccaaaacaac

SEQ ID NO: 243650 - RNA, 49 nt, Homo sapiens
cagcacacgcacccaagcgaggaaaggcaagggcagaaaagaggggaaa

SEQ ID NO: 243651 - RNA, 83 nt, Homo sapiens
ccgccagaccaggcgcggagaaggacgaagaggaagccgccccaggaggaccaaaaggagcgcgggccgagccgagggcgccg

SEQ ID NO: 243652 - RNA, 56 nt, Homo sapiens
ggcccagcggccaggcagggagcgaaacaaacaaacggcggacaaaagggagcggc

SEQ ID NO: 243653 - RNA, 75 nt, Homo sapiens
aaaaaaaggaagccaaaggcccaaaaacaaaaaacaaaccagacaacagaccccagaaaggggaccccaaccaag

SEQ ID NO: 243654 - RNA, 55 nt, Homo sapiens
agcgccacgcgcggaaggcagcgcccagcagcgcagaagagaaccggagaaaaag

SEQ ID NO: 243655 - RNA, 79 nt, Homo sapiens
ggcgccgcgggcccgcgcccggccggacccgggcccgaggcggcgcccagcggccacacgccccaagcgccacgcccgg

SEQ ID NO: 243656 - RNA, 71 nt, Homo sapiens
ccacggggaccagcagccgggccagggccagagcaaagggacgggaccggaaggacgagaccggggcagag

SEQ ID NO: 243657 - RNA, 69 nt, Homo sapiens
aacacgcaaccaccgcggaggaaggcaccggccacacgcccagaggagcgaaaacgccacaacagaggg

SEQ ID NO: 243658 - RNA, 38 nt, Homo sapiens
acgaaacacgaaagggcaggcgccacgggacacggaac

SEQ ID NO: 243659 - RNA, 73 nt, Homo sapiens
ggaccagacacacaagcagaagcacggcgggcccgggcacggaagaacacgggaaagcagcaaaaagaaaaaa

SEQ ID NO: 243660 - RNA, 83 nt, Homo sapiens
aaaggaaggagacgaaccacaaacggagacggcagacagcacaggcaggcaagaacggaagcacgggcggaggaaagcacaag

SEQ ID NO: 243661 - RNA, 66 nt, Homo sapiens
agcgccgcaaagccaagacccagcccaaacccagcaagagaaggacagacggccagggaagacaac

SEQ ID NO: 243662 - RNA, 80 nt, Homo sapiens
gaggagggggcgcggggccaccgcggcggagcccgaggaagggaaaaggacagcacaggagcccccaaggagagcggcca

SEQ ID NO: 243663 - RNA, 40 nt, Homo sapiens
cagcacccgggggaggaacgccaaaaggggagcggacggg

SEQ ID NO: 243664 - RNA, 75 nt, Homo sapiens
cgagcgcccccagcacgagcgccccaggggaccccacaccacaaaccgaggaaagaagggacagcagaaaacgca

SEQ ID NO: 243665 - RNA, 78 nt, Homo sapiens
caggccagggacggaaggggagaaccaaccaggcaccaagccagaggaccagaacggcgccgccaggccggcacgggc

SEQ ID NO: 243666 - RNA, 76 nt, Homo sapiens
gagcaacaggagagccccggccaccgacacaaggaacagccagccaggagaaaaacgaacccaacagaccacccca

SEQ ID NO: 243667 - RNA, 73 nt, Homo sapiens
gggaggggggcaaggagaagaccgggagcagggcgaagcgggccagcggccagggaggcccagggaaaccaga

SEQ ID NO: 243668 - RNA, 81 nt, Homo sapiens
gccaccggccacagccggcgcacaagcgcccgaccccccggacaccccaacaggcgacaaggccaagccgccaaagcgcca

SEQ ID NO: 243669 - RNA, 72 nt, Homo sapiens
acggccaagcccagcaacacggaggggccagcacggagaaaaaggacacggacaaaagaccgaaaaaggacc

SEQ ID NO: 243670 - RNA, 53 nt, Homo sapiens
ccaaaccaacgcagcgggaaggaaacacacgccgagaagacggccccacggag

SEQ ID NO: 243671 - RNA, 75 nt, Homo sapiens
cccagagccccgggcgccggggccgcgaggaaaccaccacggacccaaggcggaggcccagggagacccaaaacc

SEQ ID NO: 243672 - RNA, 57 nt, Homo sapiens
caccaccacccccagcacacacaaaacaccagggagcccccagaggaggaagggagg

SEQ ID NO: 243673 - RNA, 76 nt, Homo sapiens
gaagacccaaaaaaaagaggagcagcaggcacagcacgggcagagccaggacagccaggaaggcaggaacagacca

SEQ ID NO: 243674 - RNA, 67 nt, Homo sapiens
gaggggcaggagaagccaagagggggagggcagagagagcaaaagcaacggggcggcacacaaggag

SEQ ID NO: 243675 - RNA, 74 nt, Homo sapiens
ccaggcgaggaggcgcagcgccagaagcccgccgccccgcgggcgggaaaacaaagagggaaaacggagaaaag

SEQ ID NO: 243676 - RNA, 49 nt, Homo sapiens
gagcgccggcagcaaaaagggaaacacaaagaagacaccagaagggcca

SEQ ID NO: 243677 - RNA, 82 nt, Homo sapiens
agcacgaggggccggcgagaggagcgggcgcacgggaggggaacgggccgaacgcaggggggccaggccggggcacagacca

SEQ ID NO: 243678 - RNA, 34 nt, Homo sapiens
ggcagagcgacccaggcacagagcggcagcccac

SEQ ID NO: 243679 - RNA, 77 nt, Homo sapiens
cccccccgcacaaccgccgcgcagcgggccagcccccgcggcgacagcggaggcgcacccacaccggacgaggacac

SEQ ID NO: 243680 - RNA, 64 nt, Homo sapiens
agacgccaggacccacggaagccagaaagcggcaaccggcacgcaccagagcagcccacaggac

SEQ ID NO: 243681 - RNA, 85 nt, Homo sapiens
ccaagcgaacagggaagccgcagacacagcccagggggagccgccccaacaaccggacaagcagggccccaacggacggaccccg

SEQ ID NO: 243682 - RNA, 42 nt, Homo sapiens
ggaccagaggaaccagcccgagcgaggcagacgccagcagac

SEQ ID NO: 243683 - RNA, 76 nt, Homo sapiens
agagccggaccagcagaggacagagaagaggaccacccagccggagcaccaaccaccaccggcagcaagaccacgc

SEQ ID NO: 243684 - RNA, 76 nt, Homo sapiens
cagagcagggaaccaggggaaaagccaacagagggggaagaagaggaagaagaggggaaagagagaaagcacgggg

SEQ ID NO: 243685 - RNA, 79 nt, Homo sapiens
ggccggaaaaaggcgacgggcagaggaaggcgggcccaaaaggagcggaacgaccagcaggaacggaaccgcaagagga

SEQ ID NO: 243686 - RNA, 65 nt, Homo sapiens
gcgccggccggcgcgaagacgcgggggccgccccccgccaccacccgaccgggaggagacaccaa

SEQ ID NO: 243687 - RNA, 77 nt, Homo sapiens
aaaagacaagcccagagaagcagagaaagacgggagcggggcgcgcagacccaagggacaggagagagggcaagaga

SEQ ID NO: 243688 - RNA, 78 nt, Homo sapiens
cgcagccgagagccgggggagcggggccccacacccccccgggggggggcggagaacggaaaagcaccaggaagcaga

SEQ ID NO: 243689 - RNA, 87 nt, Homo sapiens
ggaagaagggggacaaggaggcacacccaggccggcaaagagcaggcacagaccccacaggccccggacacgggccacaccccgccc

SEQ ID NO: 243690 - RNA, 83 nt, Homo sapiens
agaaagagaaggccaaaaccacgggacggccccacggcgcccaccgggaaccaggaggagcggaggaggagaacggggcgagg

SEQ ID NO: 243691 - RNA, 80 nt, Homo sapiens
ggagagccccgccggagaggcgggcggcgccgggacagacccgggagcggcggaagccagacaacagggaaaccaaaccg

SEQ ID NO: 243692 - RNA, 51 nt, Homo sapiens
caccacgaaaaccggagaggagacggagcaaaagggaccacgcgcgcaggg

SEQ ID NO: 243693 - RNA, 68 nt, Homo sapiens
cacacaaaagaggagaaaaccgggcgcagccccgggagaagaggcacaaggacaggcacagagaacag

SEQ ID NO: 243694 - RNA, 51 nt, Homo sapiens
cagccaacaccagaagaagggacaaaaggcccaggccagccggccggaagc

SEQ ID NO: 243695 - RNA, 37 nt, Homo sapiens
ggggaaagcaaaaggaccagcgcgaagaacgaggagg

SEQ ID NO: 243696 - RNA, 93 nt, Homo sapiens
caaaggcaggcccggaggcggcgggacagagcgccgcgaccccagcgggcccggggaggcaccgacgaggagccaaaacggacaagccaaggc

SEQ ID NO: 243697 - RNA, 68 nt, Homo sapiens
ccggacaccccaacagcgagcaaaagaggaaaaccagcaaagccaccgcagccccgaggcccagccga

SEQ ID NO: 243698 - RNA, 49 nt, Homo sapiens
aaggcaagacaaggcaaccccggaacacaaaacgcaccaggacaaaaga

SEQ ID NO: 243699 - RNA, 81 nt, Homo sapiens
gaccacggaccaaaggccgggcgcagaacccccagaccacaggaaagaacgccggacaacagcggcgaagaaggcaaaccg

SEQ ID NO: 243700 - RNA, 82 nt, Homo sapiens
gcaagaagaacagagacagcagccaaacccccaggcaaggaaccgaaggaacaagccaaaagggaggagcagcagagcgaac

SEQ ID NO: 243701 - RNA, 67 nt, Homo sapiens
ggcgcccgcgccacagccaccagagccggcagcaaagagggaacagacagcaaagcaagccaagagg

SEQ ID NO: 243702 - RNA, 75 nt, Homo sapiens
aaagaaacaagccgggaaagggacaagaagggcaaagccgaagccagaccacaagccagagccacagcccaagga

SEQ ID NO: 243703 - RNA, 71 nt, Homo sapiens
aagacagaacgcaccaaggggaacccggaacgcagccgcaaccaggaggaaggaagagcgccgcgccagga

SEQ ID NO: 243704 - RNA, 70 nt, Homo sapiens
ggcacccagccccccgcgcgccccacaggcacaggagacagggaaacgaaaaccaccgggcaccacgagc

SEQ ID NO: 243705 - RNA, 73 nt, Homo sapiens
cgggccgagagccgcccgggccagcggccgcgcacccccggccggaggcaccagcacgggaagacccgcacag

SEQ ID NO: 243706 - RNA, 72 nt, Homo sapiens
ggaggggaccggccgggcaccagccagcaaaccagaggggggaagaaaagaaggccccccacccgaccaacg

SEQ ID NO: 243707 - RNA, 71 nt, Homo sapiens
gaggaacacaaaaaaacagaagagggagacaggaaccaacggaaaaacggggaaggggcgggcccaaaggg

SEQ ID NO: 243708 - RNA, 78 nt, Homo sapiens
ccccgggcccacccaagacaaagacgaggacgcgcacaggaaaggacgcggaacaagcaggcagccaggcagcagaag

SEQ ID NO: 243709 - RNA, 79 nt, Homo sapiens
ggcgggaaagacccaggagaagccgcccaaagaacggacgaaggacacccccgcagcgcccaaaaaagccccgagacgg

SEQ ID NO: 243710 - RNA, 69 nt, Homo sapiens
aagccaaaggagaaggccggccacccaccaacaaagaggacgaccgaaggcaccggaacaggcagcaca

SEQ ID NO: 243711 - RNA, 73 nt, Homo sapiens
gccacggcagacacacaacccgacccgacgaggagccgaagcagacagaggcggagccccaaaccccggaccc

SEQ ID NO: 243712 - RNA, 82 nt, Homo sapiens
cgcaccagagccccaacccaccgccgccaggaggaaaagggccaaagggagcggacggccccacggcaggaaggacaacgag

SEQ ID NO: 243713 - RNA, 74 nt, Homo sapiens
cggaaaaagcgaaaaaccggagccaacgaaacaaaaagcaggagaaaagccccgcaaccgacgggaagaaccga

SEQ ID NO: 243714 - RNA, 76 nt, Homo sapiens
aacacacaaggacaggacaccaggaaaaacacagagagccgacggcagaacaggaggcccggacccccagcacaag

SEQ ID NO: 243715 - RNA, 74 nt, Homo sapiens
ccccccgcggcggcagccacaggcaaaacgggcgggggcaaagaaccacaagaacaaaaggcaagaaacacagc

SEQ ID NO: 243716 - RNA, 81 nt, Homo sapiens
ggaaacccggacacccgccagcgagcggccgcccccagggacgcgagcccgcaacccccaagcagacggagccaccgcacc

SEQ ID NO: 243717 - RNA, 86 nt, Homo sapiens
gacccaccggaccccgaacccaggcccccacgccccaggaggagcaggccagaccaagagaggcggggaccgcagcagcgagaaag

SEQ ID NO: 243718 - RNA, 79 nt, Homo sapiens
gggaggaaaacaaccgagggcagagaaaccgaggaaggcagggaccggaaagaacaaaggcccaccggaagagcggcga

SEQ ID NO: 243719 - RNA, 62 nt, Homo sapiens
ggaagagcaaccccagaaggcaacgcgccgcaaaacagaacgcggagaaaagagccggaagc

SEQ ID NO: 243720 - RNA, 75 nt, Homo sapiens
gcgggaccaacaaagacgccgaccaggagcaacagacaggagcaagaggggggggcccccccgaagaaaggaacc

SEQ ID NO: 243721 - RNA, 80 nt, Homo sapiens
ggcccgcgggcgccgggggcccggaccccggcgcaggggcgacagcaagaaggagccagcacagaggcaaaagaaccaac

SEQ ID NO: 243722 - RNA, 100 nt, Homo sapiens
gggggggaaacggaggaaaacaaagcgcagggcggagcagggacaaagccaccgcccaaccagaggaaccaagcaagcacaagggacagagaaggagaag

SEQ ID NO: 243723 - RNA, 59 nt, Homo sapiens
gcaacaggacgcgccagcgaggggacggaggagcgggcgccggccgagcccgggaaaac

SEQ ID NO: 243724 - RNA, 76 nt, Homo sapiens
ccgaccaaacaagccagcagcaacagaaccccaggcgaggaaaaccaccacacaggggaaacacccagacaacaca

SEQ ID NO: 243725 - RNA, 71 nt, Homo sapiens
cccccgcccgccgaccgcggcagacggaaaagcggacagaagagagagacaccacaaggccagaagccacg

SEQ ID NO: 243726 - RNA, 76 nt, Homo sapiens
ggcgggccggaggggagacgggaggcagccacccgagggaccagcaaggaagccggcaccccaggaccgccgcaaa

SEQ ID NO: 243727 - RNA, 70 nt, Homo sapiens
caccacaagggaaaagccaaccccgacccaaagcccagcacagaagagcaacaagcggaagaccacaacg

SEQ ID NO: 243728 - RNA, 38 nt, Homo sapiens
acgagagcaccacaaggccaaggaggagcaccggccca

SEQ ID NO: 243729 - RNA, 82 nt, Homo sapiens
cgaaggccaggccagggagaaaaagcgagcccacccccacaccaacccccggaagagagccaacaccagagaggaggaacgg

SEQ ID NO: 243730 - RNA, 78 nt, Homo sapiens
ggcagcggccggggacccagcaaggcagcagggacagagcccagaaaccagagaaacagaaagagaaaaggacccacg

SEQ ID NO: 243731 - RNA, 83 nt, Homo sapiens
ccaaagccgcccagacggccaccggcgggaggaacaaaaggcccccagaagccgccgaacgccgcacccccggggccgaggag

SEQ ID NO: 243732 - RNA, 82 nt, Homo sapiens
gcgggagaaggcgcaacgcggcgcgagaggaaccgcacccaaggacggcggaggcccagcccccgcccggcgcccggagccc

SEQ ID NO: 243733 - RNA, 72 nt, Homo sapiens
aaagacggagagcccagagacacacacaaccggaaaagccgccagaaggagacgggaccagcccgcacacag

SEQ ID NO: 243734 - RNA, 108 nt, Homo sapiens
cggagacagacaccagacacagccgaccccgcccccggcagcaggggcaagggaggccggacacaagagggcaagaaaggcgcgacgggccgaaaagggacgaagggg

SEQ ID NO: 243735 - RNA, 58 nt, Homo sapiens
ggaggcgaaagcggaacgagcaaaaggaccggacccacaggcaaccccacgcccagga

SEQ ID NO: 243736 - RNA, 53 nt, Homo sapiens
cccgcagccggagacccgaaaccacaaaccagccggcgggcgccacaacggac

SEQ ID NO: 243737 - RNA, 87 nt, Homo sapiens
gcagagcaggccggaacgccgagagaaggagcaaagagggggagcacccaggacagagcgggagccaccagcgccaaagggaagcca

SEQ ID NO: 243738 - RNA, 76 nt, Homo sapiens
aacggccaaggacagaaccaccacgaaaagcaaaaaagacagggaaagggaacaggggcaaaacacggaaagcagc

SEQ ID NO: 243739 - RNA, 85 nt, Homo sapiens
ccggccgccgaccaagacagagcaaggccacgacccacgagacaggggcccaagaaaaagcaccggacaaaggccaaagaagaga

SEQ ID NO: 243740 - RNA, 76 nt, Homo sapiens
caaggccagcggggcacccgcacccccgggcacgagccggagcacgacagggagcagcaggaccgcagcaacaagg

SEQ ID NO: 243741 - RNA, 80 nt, Homo sapiens
gccggcccggggcgagccccagcaccccacacaggggacgggaccagagcggcagacaaggacaaggacacacccgaccc

SEQ ID NO: 243742 - RNA, 83 nt, Homo sapiens
ccccacccccaagaaccaacccccaaaggcgggacagggccggcccagggagaacgcaaaaccaccacccccacaaaaaacgc

SEQ ID NO: 243743 - RNA, 53 nt, Homo sapiens
cagccagccagcgagcacccacggcccagacacccagggaagccagggaagcc

SEQ ID NO: 243744 - RNA, 77 nt, Homo sapiens
ccccaagcaaaagggcaaacaaggcaagaacgccccggcaaggacggaggcaggcaccaccaacagcggggaaaacc

SEQ ID NO: 243745 - RNA, 70 nt, Homo sapiens
caagccacagacacgaccccgccagccgaccaaaagagaaagagccagaaggcagacaacaagcgaggac

SEQ ID NO: 243746 - RNA, 78 nt, Homo sapiens
cagggaggaaggcgcaggagcccggccaccacacccagcggggggagagcagccgcggcacggcgccgccagacacgg

SEQ ID NO: 243747 - RNA, 78 nt, Homo sapiens
cagaaacccgagagccagacgccaaaggaaaccccgggggacacccccagggacgacacgcccgcaaacggacaaggc

SEQ ID NO: 243748 - RNA, 83 nt, Homo sapiens
agccccgggaggacgaccaggcggacccacgcgcgggaaccaggggcagagggaccaccgacagacagggcgccggcccaggc

SEQ ID NO: 243749 - RNA, 76 nt, Homo sapiens
cgacagcaagacagccggcagaggcaagcaggggggcaaagcagagggcaggacggccggagcagcagaacaagag

SEQ ID NO: 243750 - RNA, 97 nt, Homo sapiens
caagccggaagagcccaggagcgacgacaagccgaccaaagcagcaagggcgccagagcaagggaaacagcccacaaaggaacagaagcccccccag

SEQ ID NO: 243751 - RNA, 77 nt, Homo sapiens
gaaaagccacgaagaaaaggggaaggaggcgaacaggaagcccgagaccccggggggaccgaccccggacgggagag

SEQ ID NO: 243752 - RNA, 64 nt, Homo sapiens
gccccacgcgggcccgggggcccgcgcagcgcggcaggaaaaggaaaccagaagagggacgaag

SEQ ID NO: 243753 - RNA, 77 nt, Homo sapiens
cgcggagcgccgaggccgggaacgggcggagaacggaaaagcaccaggaagcagagaggaccgcagaagggaaggag

SEQ ID NO: 243754 - RNA, 57 nt, Homo sapiens
ggacacgaaaacgcaaagccaggaacccaggacaaggggaagagcggccaagagaga

SEQ ID NO: 243755 - RNA, 58 nt, Homo sapiens
cccccccagcccgccccaaaaggagcccaccccggacgacaacgacagcgccacagcc

SEQ ID NO: 243756 - RNA, 90 nt, Homo sapiens
gagcaaagcgcgagggagccggacgccgccgcccgcacccgcagcccgcgcccgccgccgcccgccccagagagaacggacgagaccaac

SEQ ID NO: 243757 - RNA, 80 nt, Homo sapiens
cggcggggccggagcccccgccgcgccccccgccgccgcgcaacggcaaaagcagaccggaaaacccaccggcaagacca

SEQ ID NO: 243758 - RNA, 75 nt, Homo sapiens
agcacagaacccacagacacgcgcaggccgaacacaacgaagaggaacggccagcagcaaacacgaaagcacagc

SEQ ID NO: 243759 - RNA, 75 nt, Homo sapiens
acaccacgacaccgaaaacccaccgagcccgccaaagagaccagggacagaaggggggcaaggcccacagggaca

SEQ ID NO: 243760 - RNA, 75 nt, Homo sapiens
cgcccgcgccccgccgcggggcgcgcggcgccggcggcgcgcggcccccgcgcaggccacacacggccaaaagag

SEQ ID NO: 243761 - RNA, 52 nt, Homo sapiens
gagcaaagcacggacacaccagccggaagaaaacccgagcgcacgcaagaac

SEQ ID NO: 243762 - RNA, 73 nt, Homo sapiens
gaaacaacagacgaacacggaaacacgaaaaccaaacagacagagacgaagagaccgcagaagcgaaaaggag

SEQ ID NO: 243763 - RNA, 73 nt, Homo sapiens
ggcccgaggcggcgagagaggcaggcggagccgaccgggccaggaaaccccaaagagaggagaaacagcgacg

SEQ ID NO: 243764 - RNA, 108 nt, Homo sapiens
gcgaaaagaagcacccccagagaaagccaagggagacaacggccgagccaccgcaaaaaaacgagccccacccacggccgggaagaacaacagcccccaccccaccac

SEQ ID NO: 243765 - RNA, 78 nt, Homo sapiens
agaaggaaagcaccagacgccaccacgggcacccgcgccgggcaccgaggaccagccaagacagggcaacaaggaccc

SEQ ID NO: 243766 - RNA, 70 nt, Homo sapiens
acgaagaggagaagacaccaaaaagcaaacggaccagaccgaccaccaaaaggagaagccaaaggccagg

SEQ ID NO: 243767 - RNA, 78 nt, Homo sapiens
ggggggcgagcccgccgcacccgggccgcgccggcacaagacgaccccgacgcaggccaggagccgcggacagaagcc

SEQ ID NO: 243768 - RNA, 84 nt, Homo sapiens
agggagcagcgagcacgcgcccgcaacccgaaccacggacaggacccgcccagcccaacggggagacacagcccacccgcagca

SEQ ID NO: 243769 - RNA, 70 nt, Homo sapiens
cccacccgagcagccagagcggaccggggcagaccaaacggcaaggcccggacggcgggaacccggacaa

SEQ ID NO: 243770 - RNA, 76 nt, Homo sapiens
gaaggccaagcggcaagccgcacgagcaaaaacgaaccaggcacgcaacagggcggagaacggaaggagagggacg

SEQ ID NO: 243771 - RNA, 74 nt, Homo sapiens
ccaaggggagggccagccgccaggacagggccaaagcggcaggagaaggaagggaccggaaacgacaaggcaac

SEQ ID NO: 243772 - RNA, 76 nt, Homo sapiens
aagggaaggccagcagcgcgcggagaagaacggggagccagaccggagggaagacaagggccggcgagaggaggaa

SEQ ID NO: 243773 - RNA, 76 nt, Homo sapiens
cgagagcaccgaagacggcaagcacggccacgccaaggcccaagcggaggcgcaacagaaggccaccgcgcacaga

SEQ ID NO: 243774 - RNA, 80 nt, Homo sapiens
aaccaggcaccggggggcaacacccgagaacggcgggaagagaagacacgagcacaaacgacgaaccggccgcgacaccc

SEQ ID NO: 243775 - RNA, 73 nt, Homo sapiens
aaacaagagccccaaagcagccaaaagacagcgcacgaaacacacaaagaaccaccaccgggaggaagccaga

SEQ ID NO: 243776 - RNA, 77 nt, Homo sapiens
ccgacccaacaacggcaccgagacaagagggagcggacaaggcagccgcaaggaaacacaacccagccaggcgccag

SEQ ID NO: 243777 - RNA, 103 nt, Homo sapiens
aggcaagagccacacccagcaccgaacagaccccgccccagcagaagagaaaccacgcaaccgaaaaaacaagaaagcaagacacaaaacaggcccaagaaca

SEQ ID NO: 243778 - RNA, 78 nt, Homo sapiens
gccgcacaccaaaggcagaaacgcagacaaggccacgggacagggcaccacgcgcgcgccgccccagaaggggagcgg

SEQ ID NO: 243779 - RNA, 55 nt, Homo sapiens
caggcagaagaaaacccccagagaaacaaacagggaccccgagccagcgaggagc

SEQ ID NO: 243780 - RNA, 72 nt, Homo sapiens
cggccccaaacgggccagaaggcgcgaggcgggaacacgaagacagcaacggcagaacgaggagcagagaaa

SEQ ID NO: 243781 - RNA, 101 nt, Homo sapiens
ggacccggcggggcgcaccacagagaccggccaaaccacccagcagacaaacaaggggggaagagaagagccaagaaaccggcgcaaagccagggaaaacc

SEQ ID NO: 243782 - RNA, 86 nt, Homo sapiens
ggggaacccgcggcggcgggcacgcccaggaggcgccggggaacgcagggcgccgaggccagacagacaacccgcagagcccaaac

SEQ ID NO: 243783 - RNA, 37 nt, Homo sapiens
aggagcccggaggaagcccgccagccaccgcagaggc

SEQ ID NO: 243784 - RNA, 57 nt, Homo sapiens
ggaccagcagggaccaagaggaaacgggggacaacagagccgacacagccaagaagc

SEQ ID NO: 243785 - RNA, 78 nt, Homo sapiens
gagaaaaccgggaaccagagcaaagaagaaaccggccagaaacagccagagaagcagaacaacagaggcagcaggcac

SEQ ID NO: 243786 - RNA, 77 nt, Homo sapiens
acaacgacaagcaagcagggcacggaaaaccgcagcaggaagcgggggcggcgccagcgcgcgccccccagagaagg

SEQ ID NO: 243787 - RNA, 83 nt, Homo sapiens
gccccggggacgccagcaccagcaggagcagccaaccagcagcagccacaggaggaacagagacaaaggacccagaaggaaag

SEQ ID NO: 243788 - RNA, 83 nt, Homo sapiens
cgggaggccggccgggccagcacccggccgagacggcggcagcagcggcacagggagaccggaacccccaaaacagaccagcg

SEQ ID NO: 243789 - RNA, 82 nt, Homo sapiens
gggaggagccgccccgagcacccaggccacagaggaggaaagagaggggaaagaagcagccaagccccaaggaaccacagca

SEQ ID NO: 243790 - RNA, 70 nt, Homo sapiens
caagcagccgccgggaaaccaaggaggcagacagggacagcaccgcgcgaggccgacaaccaacaagaag

SEQ ID NO: 243791 - RNA, 33 nt, Homo sapiens
cgggagccccaccaccccgaaggagacccaaca

SEQ ID NO: 243792 - RNA, 60 nt, Homo sapiens
gcagccgccggacaaaagggaccccaccgaccccgaccgcaaccgggaaagaaccaccag

SEQ ID NO: 243793 - RNA, 73 nt, Homo sapiens
gacaagaggggaaagcaggagagaagaccagaagggaggagagccaagcagaagaaccagcacaggcgaagcc

SEQ ID NO: 243794 - RNA, 76 nt, Homo sapiens
aggaaaaagagaaccgagacaaaagaagaccaaaacgaggcacaaaaagcagagcacgagcacaccaggacgccaa

SEQ ID NO: 243795 - RNA, 74 nt, Homo sapiens
ggcacccgcaggagagggaggcaggccgaggcacggagcgcccccacaggagaggggggcaagagcagacggcg

SEQ ID NO: 243796 - RNA, 91 nt, Homo sapiens
gacagcgagcgggagaagcggggcaagacccaaagacaggaccacgcaccagcagagaaggaaagcaaaccgaagcaggcgggcaccaccg

SEQ ID NO: 243797 - RNA, 83 nt, Homo sapiens
gcgccgaccaggaaccaaccgagcacagcacgggagaggcaaacccaagccaggaggagcccgccacagaaacacagacagag

SEQ ID NO: 243798 - RNA, 66 nt, Homo sapiens
agaagaaaccggcggccaaaaaaaaaaaaggaagcacaccaagccaacaagccaaaggaagagcca

SEQ ID NO: 243799 - RNA, 80 nt, Homo sapiens
ccaggcaggccccggcaccacgccagggaccggagccacgcgaggcacggagccgagaggccgagaccgaccagcacgac

SEQ ID NO: 243800 - RNA, 71 nt, Homo sapiens
cccagggaggccgcacggcccacgcgaggacgcacaggggcggcagcgagaaggccgaaagaaacaaaaca

SEQ ID NO: 243801 - RNA, 77 nt, Homo sapiens
cagcaccccacgcgagaacgaccacgcaggaccaagaacgcccagcccgcgggcaccggcagaaaggaggaggaaaa

SEQ ID NO: 243802 - RNA, 91 nt, Homo sapiens
agccgacaggcggaggcccccgggcaagaggcgcaaacaagccaacccaggaggaaaaacggccaacgagcgcccccaagcggagccggag

SEQ ID NO: 243803 - RNA, 59 nt, Homo sapiens
acgcgggccaggaaacaaaacgaccagcaaaggaccgggcacaccagcccgcagggaag

SEQ ID NO: 243804 - RNA, 73 nt, Homo sapiens
ccgggcggcagagccagggaccaacaacgcccgccggggaacgaggccgaggaagcaccacagcaggagaaaa

SEQ ID NO: 243805 - RNA, 69 nt, Homo sapiens
cgaaaaaagggcaagaagccagaagccccgcggacaggaaggacgggacagacagaaaccccccgggca

SEQ ID NO: 243806 - RNA, 63 nt, Homo sapiens
ggaaacaggcaaaggaagaagccagcgagcggggcgcgcggccgcggacgggccccgaagccc

SEQ ID NO: 243807 - RNA, 65 nt, Homo sapiens
cagccccgaggcgggacacaggcccaagagaaacaggcacgccgcaccacccaccagcggaccgg

SEQ ID NO: 243808 - RNA, 78 nt, Homo sapiens
aaaagaccccccagaagggcaacaagggacgggaaagaccgacccaacaagacagaagagaagcagaggcgagagagg

SEQ ID NO: 243809 - RNA, 47 nt, Homo sapiens
gagacagggccgcgccaccaggacccagagagaacaaggccccccaa

SEQ ID NO: 243810 - RNA, 78 nt, Homo sapiens
cccgaggggacagaggaccggggcacccaacagcggagcaacggcccgaagaccgcaggaaagcaggaaggcaagaaa

SEQ ID NO: 243811 - RNA, 81 nt, Homo sapiens
aaagaggcgcagcacgcagccccagcccggcccaagcgaccggacagaagacagaccgacagacgccaaaccacccgagag

SEQ ID NO: 243812 - RNA, 53 nt, Homo sapiens
agcacgggcagagccaggaggcagaaggcaaagcaagcccgcacagccggaga

SEQ ID NO: 243813 - RNA, 69 nt, Homo sapiens
aggaggacaccccgacaggcgcacaaaagaaaagcaaaggcacgaacaaagcggccagagggaaaacca

SEQ ID NO: 243814 - RNA, 73 nt, Homo sapiens
cgagccggggccccgccggcccaggggcagggcacagcagccgggaagaagcagagggccgcaaggagagaac

SEQ ID NO: 243815 - RNA, 87 nt, Homo sapiens
agcggagcaggggcgcagaagggagaggggagcgacccggggaccgaccggggaccccgccgaagaggaagaggaggcgcaacacaa

SEQ ID NO: 243816 - RNA, 85 nt, Homo sapiens
ccaagcgacccccaccacccagccccgagagcggaaccacaagcaccagcacgccggcaagccgccaggcacagagaaggcaaac

SEQ ID NO: 243817 - RNA, 54 nt, Homo sapiens
ggcgcccgagcggcagaccgaccaccccccagacgaaaagaaggcaggggaaac

SEQ ID NO: 243818 - RNA, 79 nt, Homo sapiens
ggagcggcgcagcggcggcagcggagagcgagagaggggagcagcagacaagaaggaagaggaaggccgaagagaggcg

SEQ ID NO: 243819 - RNA, 67 nt, Homo sapiens
ccgaccgaccaccgcacggaccacggagaagaaggaaggggaagaggcagaaaaggaagagacgccc

SEQ ID NO: 243820 - RNA, 76 nt, Homo sapiens
caagaacagggcagccgccaaggccagaaggcggcccagacaacagcaacagcgaggcggacaacaggagcacgca

SEQ ID NO: 243821 - RNA, 80 nt, Homo sapiens
cagaacaagaggcgaaaagaagaaaaagcagcagagagagcccaccagaggcaggaaaagcgccagggggggacacaacg

SEQ ID NO: 243822 - RNA, 45 nt, Homo sapiens
gcaaccagggaaacaggagagaaaaaagcagcaagcccggcagca

SEQ ID NO: 243823 - RNA, 80 nt, Homo sapiens
caccacccacacccaccaacaacaccacaaaaccacagccaaggggcccgggcagagggaaagcagaggacggaacaacc

SEQ ID NO: 243824 - RNA, 75 nt, Homo sapiens
gaaggcccggggcggcgccagggcgggcccaacccgccgaaccaaccccgggagccaggagcccggcgcgcccgc

SEQ ID NO: 243825 - RNA, 66 nt, Homo sapiens
accgcccaaccgcacggcacccggcgccgggggaagaccagcccgcccagacccgaacgaccgaac

SEQ ID NO: 243826 - RNA, 73 nt, Homo sapiens
cgcaggcaggccacgccacgggggagccacccggcggagcaaggggaacaaagcggcaaaagaacccacaaaa

SEQ ID NO: 243827 - RNA, 74 nt, Homo sapiens
gacagcgagcgaggacgaggaacggcgccaaaagccaaaagccgagaacgacgaagacggccaacaaggccccc

SEQ ID NO: 243828 - RNA, 67 nt, Homo sapiens
cagcgggccaacagcaacagagagagccagaggacaacaaaaagaaacaggaagaaggaaaagaacg

SEQ ID NO: 243829 - RNA, 69 nt, Homo sapiens
agagcacaaagaagccaggggagagcgcaccagaggagaccgccagaggacaggagacacgcgggggcg

SEQ ID NO: 243830 - RNA, 55 nt, Homo sapiens
ggaaacagagaagaagagaagaaagcacaaaccggccaggcagcaggagaaacga

SEQ ID NO: 243831 - RNA, 54 nt, Homo sapiens
aaaaaccccaaaaggcggaaggaccaccaggacagcagaggcacggcgcagagg

SEQ ID NO: 243832 - RNA, 83 nt, Homo sapiens
gacgagcgacccgggagacacgacgccagagacgcgcacgaaacgacgaagaggcccgaggacagaggagcaaaggagggacg

SEQ ID NO: 243833 - RNA, 78 nt, Homo sapiens
gaacgggaaaagaaacggccgcagggcagacacggcccgggcaaacagcagaacgcaagaggggaaccacccaccgag

SEQ ID NO: 243834 - RNA, 82 nt, Homo sapiens
ccagaaagcagaggccagagcggagacagacgggaacgaagaaggacagaacggacaaggcagagcaaggaaaagacggcca

SEQ ID NO: 243835 - RNA, 54 nt, Homo sapiens
cgagcgaggacacagcccgcggaggcagcggcacgggaccccaaccaggacgca

SEQ ID NO: 243836 - RNA, 66 nt, Homo sapiens
aggagaaagcagagccagcagcccagaaacgaggacacgagcgaagacagagcccggaacgggaga

SEQ ID NO: 243837 - RNA, 74 nt, Homo sapiens
ccacaacacccaggcgaaggcggacagggaaaacgccgccgagccggagaaggaagagggaaagacgcaccaac

SEQ ID NO: 243838 - RNA, 72 nt, Homo sapiens
gcggaagcggggaggaggccccccccagcgaggggggccggggcaaagaccggcaagacggaagggcgacac

SEQ ID NO: 243839 - RNA, 86 nt, Homo sapiens
ggagacaacggggagaagggaagcgcagacgggacacagcggggcaggagcgcccgcaccacaccccacagagcccgaccaagccc

SEQ ID NO: 243840 - RNA, 81 nt, Homo sapiens
gaagccggcgcgccgggggccggccgcgccggccggccgggaccagccgagagcggcccaggaggaacaaccagcccaccc

SEQ ID NO: 243841 - RNA, 76 nt, Homo sapiens
aagcgccgagaaagaaggcccaaaagagcggagcagggagagcaggaccacacacggagggaggcaccaggccagc

SEQ ID NO: 243842 - RNA, 51 nt, Homo sapiens
agcgccggaaaccaacaaagagcccggcagggaaccaacccagccacaacc

SEQ ID NO: 243843 - RNA, 53 nt, Homo sapiens
agcccgcccaaagaaagaaggagacccccagcaccccgggcagcggagaggcc

SEQ ID NO: 243844 - RNA, 69 nt, Homo sapiens
gggaaagcgcagacggggaacgggacagggcagcgcaagccgagggggccaccgcgcccgcaaaacgcc

SEQ ID NO: 243845 - RNA, 76 nt, Homo sapiens
cgggggaaaaaccaggagacacaaacagaaaaggaagaaagggacaaagagaggagcagcaaaacaaacggagaga

SEQ ID NO: 243846 - RNA, 85 nt, Homo sapiens
agcgaacagcgcgaggcggcggcagcgagccgggcccaccaggccgcgaaggcaaagaagaacccagcccccccacgacccaggc

SEQ ID NO: 243847 - RNA, 54 nt, Homo sapiens
ggacgccacacccaagagaagcccgaacgaggaaccccagagaggacagaagcc

SEQ ID NO: 243848 - RNA, 44 nt, Homo sapiens
cgcccccaccccccggggaaacaggcgccacgggacacggaacc

SEQ ID NO: 243849 - RNA, 81 nt, Homo sapiens
gggcccgcgcgcccggccaagaggcaaaggggaggacgcagcaaaccaccagaagggaaacgagcacggagcgcccacgga

SEQ ID NO: 243850 - RNA, 72 nt, Homo sapiens
acggacaacagcccaacaacacccagaacacaaaaccaaaacggacaggggccacagagacgacgagagaag

SEQ ID NO: 243851 - RNA, 81 nt, Homo sapiens
gccccaaccggacgcgcaccggagaaaaccagcagagaaggcaggcaaagaacagagagcagcaacccggaaacggaaaag

SEQ ID NO: 243852 - RNA, 78 nt, Homo sapiens
gccgccgccgaggccagcacccaagggggcaagggcggagaaacaagaacaggcccggagaagaagcaacggaaaacc

SEQ ID NO: 243853 - RNA, 76 nt, Homo sapiens
aggcggacagcagcgcaggcaaaaaacagccccgacaagggaccgggcgggccccgcaggaaacccccaccggccc

SEQ ID NO: 243854 - RNA, 54 nt, Homo sapiens
gcgagcacacgggggagcccagaggagacaggccggcagcggggcaggagaacc

SEQ ID NO: 243855 - RNA, 70 nt, Homo sapiens
cacgcccaaacccgagaccaggccaggaggcacgagcagaccgagaagcaccgccgaggccgaacgacaa

SEQ ID NO: 243856 - RNA, 70 nt, Homo sapiens
gaccaaagacaaggccaaagagacgcagagccacacaaagaaggggaaccccaggaaggcaaaggagaca

SEQ ID NO: 243857 - RNA, 66 nt, Homo sapiens
acaccggaagcgggaaaggacaaaccggcgaccacacacggggacgacggggaagccggacagcaa

SEQ ID NO: 243858 - RNA, 58 nt, Homo sapiens
agacgggccggcccagagccccgggcgccggggccgcgagggccacaagggaacagaa

SEQ ID NO: 243859 - RNA, 80 nt, Homo sapiens
accgccggagcccgagcgccgccgcgcccggcgccggagcgacccgagcggcaggaagaaggagaaggacacgccaagga

SEQ ID NO: 243860 - RNA, 79 nt, Homo sapiens
cccagggagagggagcgaaccaacaccggccagacccagccaaagcccgaccaacccgcagccaccaacacgcacacgc

SEQ ID NO: 243861 - RNA, 87 nt, Homo sapiens
cacagaacacaacccgccaaggaacaaggagcggggaccccacaccacaaaccgaggaaagaagggacagcagaaaacgcagaggga

SEQ ID NO: 243862 - RNA, 83 nt, Homo sapiens
accgcgccagcggagcgaacccgagagcgggagcgggcgggccagagggcgcagccaccacccacaagacagagagcaagacc

SEQ ID NO: 243863 - RNA, 57 nt, Homo sapiens
cagaaacagagggagaaggccaccgggagcaggagagggccagaagacaaagggcca

SEQ ID NO: 243864 - RNA, 76 nt, Homo sapiens
gaaaaaagagaaagggccaacggccggagaaaaacagcagggccggagacagcagcgggaagcagaaaaggacagc

SEQ ID NO: 243865 - RNA, 88 nt, Homo sapiens
aagcaaaggcaccagcccaagcgccccccccgccccccaggaggggcgagagggagccgcagcgagcagaagaagccacacacagaag

SEQ ID NO: 243866 - RNA, 79 nt, Homo sapiens
gcacacggaagaaacgcaacccagcccagagccccgcagggagaaaggaagggccaagaaaagaagaaggacggaggag

SEQ ID NO: 243867 - RNA, 70 nt, Homo sapiens
aaacaaggaaaacggcgcgacagacggcaagaaagggggggagccgcacgacccgaacgccagagacaaa

SEQ ID NO: 243868 - RNA, 84 nt, Homo sapiens
gagcgcaggcgaccaaggaaccacacccccaagaacagcagaagaagcaggcagaagccaaccaaaaagacaccaacccaaacc

SEQ ID NO: 243869 - RNA, 55 nt, Homo sapiens
gggaccacggaccccgccggcccgggagggaacaaagaggaacaggccaaaccag

SEQ ID NO: 243870 - RNA, 67 nt, Homo sapiens
gagcagcagagcagggagacggaggaggaggagaagaagagaggacacaacacagaaaccaaaagaa

SEQ ID NO: 243871 - RNA, 73 nt, Homo sapiens
cgcgggcgggaacggagggcgcagcgcccacccgcgccagagaccagaaaagaccacaggcaaacaaagaacc

SEQ ID NO: 243872 - RNA, 78 nt, Homo sapiens
cccgggaggaaggaacgaggcaaggagcaaagcagcggcgcagcccggggacaaaccggcgaccacacacggggacga

SEQ ID NO: 243873 - RNA, 81 nt, Homo sapiens
accgaccgccgccgcgcaccgcgaccgaaaagacgcggccccaaaggaaacacccgaagaacacagcgccagcccaacgga

SEQ ID NO: 243874 - RNA, 80 nt, Homo sapiens
cggagacccacgcagagggcagaagcggaagcggagggggcaagacaacacagggcagcccaagacggcgaggaggcccg

SEQ ID NO: 243875 - RNA, 83 nt, Homo sapiens
acgggacacagcggggcaggagcgcccgcaccacaccccacgccagaagaaggaagggagaggcaagaacgccaccgaaaaca

SEQ ID NO: 243876 - RNA, 79 nt, Homo sapiens
caacggcagaccgcagaacacccagccaggggcggcgacggcggcgcgaggaccgaccgggcccgcggacgaagaaggc

SEQ ID NO: 243877 - RNA, 47 nt, Homo sapiens
caagagcagcgaccgggcacccccgccagagggagcaacaccgccca

SEQ ID NO: 243878 - RNA, 59 nt, Homo sapiens
gaggccgcgaacgcacaggagcacgagccagggagccgccgggaccggcccgggagacg

SEQ ID NO: 243879 - RNA, 56 nt, Homo sapiens
caccacaccgagcccaagcggaaagcacgcgcacagagggcacagagagcgcgaag

SEQ ID NO: 243880 - RNA, 47 nt, Homo sapiens
ccaccggacgccccagaaaagaggcaagcacgaggagcggcaggacg

SEQ ID NO: 243881 - RNA, 73 nt, Homo sapiens
gcaagaaacgggggaagcagagcgcacaaagggaaaggcagggagaccagaggccagaccgccgggggagaag

SEQ ID NO: 243882 - RNA, 70 nt, Homo sapiens
cacgaccaggccggcaaaaccacacagggacaccccagacagcaaagcaagccaagagggcccagccaag

SEQ ID NO: 243883 - RNA, 75 nt, Homo sapiens
aggcgcacgaacagaggcacgggaaaaaacgcagcaaacaccaggagaaaaaagccagaccaacgagcgagcacg

SEQ ID NO: 243884 - RNA, 71 nt, Homo sapiens
aagcaagaagacacagagaagcccggccggaacccggagaaaggcagcgagagcccagagaagggaagaaa

SEQ ID NO: 243885 - RNA, 55 nt, Homo sapiens
gagggaagggcggacacaccgaaagcgaacgcgaaaagaaaagccgagagcagcc

SEQ ID NO: 243886 - RNA, 37 nt, Homo sapiens
cacagcacgggcagagccaggagaaagacagcaaaga

SEQ ID NO: 243887 - RNA, 69 nt, Homo sapiens
gaaccgcgcggccgaacccccggcccgaaaaagcccaagacagcagaagcagacaccccaggaacagca

SEQ ID NO: 243888 - RNA, 75 nt, Homo sapiens
gcgcaaggcccccgccacccggcgccagggaaggaccgcacacaagccgcaccggacacgcgcggagcgggagga

SEQ ID NO: 243889 - RNA, 64 nt, Homo sapiens
cccgaaaacaagaagcggaagaggagaaagccagaaagggcccagaagaaccccagcacccgag

SEQ ID NO: 243890 - RNA, 77 nt, Homo sapiens
gccgcaaacaacccgggaaccccacagaaacagcagagccacccgcaggcaccagagaaggaaaagagccgacagca

SEQ ID NO: 243891 - RNA, 88 nt, Homo sapiens
cccggcacacgcgcagccccggccccggcccgccggagaaacagcccagcagagcaaaggcccgagaagcgggcccaccaccaagcca

SEQ ID NO: 243892 - RNA, 83 nt, Homo sapiens
gcggaccgaggaggagagccaggaccggcaacgaaaacgcggcgggggacggcgccccgggaagggcaccgccgaccgaaacc

SEQ ID NO: 243893 - RNA, 62 nt, Homo sapiens
gcgggagcacgccggcccagcccaaacgggcagcgaaggaggcgcggccagcgaagaagacg

SEQ ID NO: 243894 - RNA, 75 nt, Homo sapiens
accccacaggcccccaccaggccgcggcagagacaggcagaaaagacgacccaccacacgacagagaagagaaaa

SEQ ID NO: 243895 - RNA, 74 nt, Homo sapiens
cgcccgccgccgccgcccgccccgccgcccgccgccggccggcgcgcgccccacaggaaacacgccgcaccagg

SEQ ID NO: 243896 - RNA, 70 nt, Homo sapiens
cacccccggcgggccggacccaagaggccccaagagggagaacccacggcacaggggcacgggcggacgg

SEQ ID NO: 243897 - RNA, 62 nt, Homo sapiens
cggcggagcaggagggcccaagaaggagaccagacgaaggcaaaagcagaccggaaaaccca

SEQ ID NO: 243898 - RNA, 71 nt, Homo sapiens
aacagaagcgcggccaaggccaagggaggaaaaagcggcacagaggaagaggcccaccccaggagaacaaa

SEQ ID NO: 243899 - RNA, 82 nt, Homo sapiens
gacaaccgaaaggggcacaggaggggcgcgggcgagggagaagaaccggggccggaggaggggcggacacagccagcgccag

SEQ ID NO: 243900 - RNA, 60 nt, Homo sapiens
ggagaagaggcaggaagaccgccaacaggggaccagcggggacaaggggacggcgaaggc

SEQ ID NO: 243901 - RNA, 72 nt, Homo sapiens
aaagaagaaggcaagagaagaccgagaaaggcagcaggcgcccaaccaggagcaccaggccaaccgccaaca

SEQ ID NO: 243902 - RNA, 83 nt, Homo sapiens
gccggcagggcccccgccagccccgaggccaaacggacaccaagggcaacgccagagaaagggggccgggacccgggacaggg

SEQ ID NO: 243903 - RNA, 77 nt, Homo sapiens
ccacaaagaggacaccccagggagcccaccacgagcagaaccagcaccgagaggaaagagagccgaggcggcccacc

SEQ ID NO: 243904 - RNA, 72 nt, Homo sapiens
cccaacggaaggcaggacgaaagcaccgaacaggaaaagacccggaacccgcggggccggaacaccaaccgg

SEQ ID NO: 243905 - RNA, 68 nt, Homo sapiens
gaaggaccaagaaccaggcacaaggcacaaagcaggaggcaggaggccaggaagaggcccagacccag

SEQ ID NO: 243906 - RNA, 71 nt, Homo sapiens
ggacaaggcggagacgccggacaagggagcagcgggagacgacgggcagaagaggacagcagcggacggcc

SEQ ID NO: 243907 - RNA, 37 nt, Homo sapiens
gaggcacacaccaacgggggccacgcaacagggggag

SEQ ID NO: 243908 - RNA, 75 nt, Homo sapiens
ggaggagacggggcagacaacggagcccgggcaagccagacaacaggccaaagccagggagggccagccccacaa

SEQ ID NO: 243909 - RNA, 80 nt, Homo sapiens
gcgccgcgccgcgccggcccagggagccccggcaagcaagaaagccaccacaagaaaaggccccaccggggccagcggca

SEQ ID NO: 243910 - RNA, 74 nt, Homo sapiens
gaagagacgacacaaggagacgaggggaagagccaacgccaagaaccaagaaagacgacgcggaacgagaggac

SEQ ID NO: 243911 - RNA, 81 nt, Homo sapiens
agcccagagaggaccgaaaacgaaacagaggagcacgaaacaagaaaaggggcccgggaaacagagaaacaccgaaaacag

SEQ ID NO: 243912 - RNA, 78 nt, Homo sapiens
aagaaggccagcaaaagcggaagagccgcaggggacagcaggaagaaacaccgagaccccgggacacccagaggggca

SEQ ID NO: 243913 - RNA, 78 nt, Homo sapiens
aaccaaaccacgaccaaaggcaggcagaaggggagaaaccaggacgaaacagggaccagggacggacgggaccaagac

SEQ ID NO: 243914 - RNA, 72 nt, Homo sapiens
gggagagaggacccccccccccccccaagggacgaacagcggggacgccccagcagaccgcccaggagagga

SEQ ID NO: 243915 - RNA, 65 nt, Homo sapiens
gaggagggggcaccgagcaacgagggcaggagccaaccggccgggacacggacaggggggaagcc

SEQ ID NO: 243916 - RNA, 83 nt, Homo sapiens
ggcaaaggggacgcccaacgaagagaccaccgcccgagcaggcccggccaacgcaacagggagcccacgcaagaggggccggg

SEQ ID NO: 243917 - RNA, 83 nt, Homo sapiens
gaacgacagcacacagccagaaagaaggcgccgcacggggcgacaggaacagaaaggacagaggacaccacgggaaaaagaac

SEQ ID NO: 243918 - RNA, 86 nt, Homo sapiens
gcgcggcccgggagggcagaagcgccgaggacgagaaccggccgaacgaggcgggcgggggacccagccaaggacgggggccagca

SEQ ID NO: 243919 - RNA, 66 nt, Homo sapiens
aacggcccgagaaaagggcagaagaggccaaggagaagaaagaaccgggggaaacacaaccgcccc

SEQ ID NO: 243920 - RNA, 69 nt, Homo sapiens
cggccggcggcacccgcacccggggacaagcgcgggaacggcgcggaaggggagacgagcaagacgaga

SEQ ID NO: 243921 - RNA, 77 nt, Homo sapiens
ggagcccccagaggaacccgacaggaccgccggagcgggacccacgccccccccagaggccgagcaccagcccaggc

SEQ ID NO: 243922 - RNA, 76 nt, Homo sapiens
caagagcagaggccccagaccgccaagaggcacagggcacaccaaagggaaccaagaagggacccaaaaagacgga

SEQ ID NO: 243923 - RNA, 77 nt, Homo sapiens
aagcgcgcacacccgccgacgaggaacggcggagcagggagcccaaagaccccggagacaggccggaggaagaaaca

SEQ ID NO: 243924 - RNA, 77 nt, Homo sapiens
gcacacaaggcgggcccacccccaaccgaaacaacggacacccccgggaacccaccaaaaaggacaccgaaagacgg

SEQ ID NO: 243925 - RNA, 79 nt, Homo sapiens
gacaacagccaaagcacccaccagagcaaagacgcacgcaggaaaaccaagcaacacgaagacgagagaagaagaaggg

SEQ ID NO: 243926 - RNA, 39 nt, Homo sapiens
gcccgccaagaaagagggcaggaagcccgaggaacccag

SEQ ID NO: 243927 - RNA, 75 nt, Homo sapiens
gacgacagggacgcgggacaggagggcagcccaaacgcccgagaaggccacgcgcagaaaaggccaccaaaagcc

SEQ ID NO: 243928 - RNA, 76 nt, Homo sapiens
gcgaggccagccagaacgccggggaccaggcccgggcgccgcaaaaggagggagaagagggaggcagcacagaaga

SEQ ID NO: 243929 - RNA, 62 nt, Homo sapiens
ggccagaaaacaagaagcagggccaggccagaagggccaccacgcacgccccaaacggacga

SEQ ID NO: 243930 - RNA, 72 nt, Homo sapiens
acaaggccaccacgcccgccgggccgcaggcaggggggacccgcccaaccccggagagaaggcgaggaagcc

SEQ ID NO: 243931 - RNA, 58 nt, Homo sapiens
cgcgccaagggcacagagggagaggaagcgaagaacacccgcgacagcgggacggaca

SEQ ID NO: 243932 - RNA, 62 nt, Homo sapiens
gcagaccacgccacggcgcccgagacggagcggagccacgcgggccaagaaggagaagcgcg

SEQ ID NO: 243933 - RNA, 77 nt, Homo sapiens
aaaaccgccgaagcagcaaaggaagcagagcagcagaaagaaacggaagaaccgagagaaggccgcaggaggaaaag

SEQ ID NO: 243934 - RNA, 59 nt, Homo sapiens
caggaagcaggaagcagaaccagcaagacaagcggagaggggcccacaaaccaacaacg

SEQ ID NO: 243935 - RNA, 58 nt, Homo sapiens
gaagacgagccgggaggaacggcccggaaacaggaggacggacacccacaggagagac

SEQ ID NO: 243936 - RNA, 83 nt, Homo sapiens
ccgcgccgcccgcccgccggggccccgcgccgccgcccgccgccgcggagcagagagccccgcgacaagagaagcaccagaag

SEQ ID NO: 243937 - RNA, 77 nt, Homo sapiens
agaaagggcgggaaagccacgggaaaagaaagaaaccgacgggaagaaacagagagcaaagggacaaacacaaaaca

SEQ ID NO: 243938 - RNA, 89 nt, Homo sapiens
cgccacagccaccagagccggcagcaaagagggaacagccaaagcgaggccaggaacgacacaaggggaagcgaaaccggagaaggaca

SEQ ID NO: 243939 - RNA, 80 nt, Homo sapiens
cgagcaggcccagggaaagaaacagaggacaagaacccaagaaacaggaaaaaacccaaaacaccaaaaggaccagcgag

SEQ ID NO: 243940 - RNA, 72 nt, Homo sapiens
aaggaccaagaaccagcggcccgaaggacccgcaacaggcacgcagcagcacacgagaagccaaggcacagc

SEQ ID NO: 243941 - RNA, 76 nt, Homo sapiens
gccacccagacagaagcagaacggcagccccagacggggagccaaaagagccgggcacaaagccagcgagcgaaaa

SEQ ID NO: 243942 - RNA, 78 nt, Homo sapiens
ccacaaccaagagaaacaacccccccgggcgcgccggacaggccgccgcggcgggacagcggccccaaggaccgcggg

SEQ ID NO: 243943 - RNA, 71 nt, Homo sapiens
gccgggcccaccccccaccaaggaagagggaaggggaacaggaccggccacagacagccccccaggggccg

SEQ ID NO: 243944 - RNA, 75 nt, Homo sapiens
aaacagcccggccacaacagagcgaggaacaaaaggaagaaaggaagacagagaaaaaagaacaaaaccacagaa

SEQ ID NO: 243945 - RNA, 79 nt, Homo sapiens
cagcagaagaagcgccaagaacaagaaaaggaccaggcgacgaggaagcacggagagcaagagacaggccagacccccc

SEQ ID NO: 243946 - RNA, 91 nt, Homo sapiens
gccgcggagggcacgcgacccccaacgccaagcagcccaccgacaggcccggaggcagcagaaggcaaggacggggacacaagaccagcca

SEQ ID NO: 243947 - RNA, 55 nt, Homo sapiens
gacaccccggaagcgggaaagccaaacccagcccaaggacacaagcaacaaaccc

SEQ ID NO: 243948 - RNA, 74 nt, Homo sapiens
accagcacggcgcaacaggaccacagcaagacgacaagcacggacagcagaccacagcccggcaggcccaaaaa

SEQ ID NO: 243949 - RNA, 78 nt, Homo sapiens
gccccccagaccagcagggggcacaccaggagggacgcgcaggcccgggggcacccgaggaggaagagggcagggccc

SEQ ID NO: 243950 - RNA, 77 nt, Homo sapiens
gcaggaaagcaggagcccacagccccagcgccagacaaagaagacaggcagaaagccaaacagggaggcccagagca

SEQ ID NO: 243951 - RNA, 86 nt, Homo sapiens
aggacacaagaagacggacagcggggacgaggcggacgacgaccggccaacaaggccggcagaagacggggccccgccagcccgac

SEQ ID NO: 243952 - RNA, 83 nt, Homo sapiens
ggaaaaccgaagggaaggccagcagcgcgcggagaagaacggggagccaggaagggccgggccggggcacgggcccacggccc

SEQ ID NO: 243953 - RNA, 65 nt, Homo sapiens
aagcagcacccggaagagcacagcggcgagcagccaccacaagaccccggccaccacgcggcaga

SEQ ID NO: 243954 - RNA, 64 nt, Homo sapiens
cgggggcgcagagcgggcaaggacaagggagagacagagcgacagagagaaaacacgagggaga

SEQ ID NO: 243955 - RNA, 87 nt, Homo sapiens
cgcgccgcgcacccgcgccagcaccacgcccgcgccgcgccgccgccaccagcccaagagaaagagacgagagccgaggcgccggaa

SEQ ID NO: 243956 - RNA, 80 nt, Homo sapiens
cgagacacaaagggaaagcggaggaggcaaaacagacagaacgcagaaagcaggcaccgacagaccaagggaggagagac

SEQ ID NO: 243957 - RNA, 76 nt, Homo sapiens
acgaccgcggccgcaggagaagacaacagcagagccgcggccccagggaaaggggaccaggaacgagcacggaaag

SEQ ID NO: 243958 - RNA, 57 nt, Homo sapiens
cagaagccaggggcacagccagcccagacaggggccagagggagcacagcgcggaag

SEQ ID NO: 243959 - RNA, 73 nt, Homo sapiens
cagcgcccccagggggcaccggccgcgggcccgggaagggcgcccagaccagccagggcgacacaggaacccc

SEQ ID NO: 243960 - RNA, 74 nt, Homo sapiens
caacacggcaaaaacgcaagaggagggaagggcaggcaaggagagacccgcgggcggaacaccccggcaccagg

SEQ ID NO: 243961 - RNA, 80 nt, Homo sapiens
caacaccccggccaccgacccacaagcccccgcgacgagcccccaacgagccaccaacaggaacagacccgacacgaccg

SEQ ID NO: 243962 - RNA, 75 nt, Homo sapiens
agggaagcgcagaaaggaaaacaaaggagcacaggaaaacggcagacccaccgaccaacaaagaaacaacccaaa

SEQ ID NO: 243963 - RNA, 77 nt, Homo sapiens
aagccggacccgccagaggaccaacagggacggagcggagaaaaggaaccggccccggaaaagcagcacgaagcaaa

SEQ ID NO: 243964 - RNA, 75 nt, Homo sapiens
caccaacagggaaagccaagggaaaaaagcaaagcaaaagacccacaggaccgcgaacaaggaggccacaaaaca

SEQ ID NO: 243965 - RNA, 73 nt, Homo sapiens
gcaccgacacgaaggcaccggcgagaacagcaccacgagaggaccgcgaggaaagcaggaacgaacaggccca

SEQ ID NO: 243966 - RNA, 40 nt, Homo sapiens
agacccggacagggcaggaaacagcccgacggagcagcag

SEQ ID NO: 243967 - RNA, 53 nt, Homo sapiens
caccccaacgggacaccagagcgcagagaccccgggggccgagacaacaagaa

SEQ ID NO: 243968 - RNA, 60 nt, Homo sapiens
ccggaaaagccccaaacgcgccaacgaacccagagggaaacagccagacggggcccccaa

SEQ ID NO: 243969 - RNA, 84 nt, Homo sapiens
gcgagggagggacaggacagcggccaggcccgcccccccccgaccaggacaagaccaccgaccggggccaccacccgggaacgc

SEQ ID NO: 243970 - RNA, 61 nt, Homo sapiens
aagaaggcagcaccggcccagcacggccccaacgccccaaggggccccagaaccgcaccgg

SEQ ID NO: 243971 - RNA, 73 nt, Homo sapiens
aagaaaacaagccagggccccacgacacaacgcacaccgacagagaacccaggccaacacacagacagaggca

SEQ ID NO: 243972 - RNA, 32 nt, Homo sapiens
accgaaagccagcaaaggagacaaacaagaag

SEQ ID NO: 243973 - RNA, 68 nt, Homo sapiens
gcaagcacaaggggaaaggcgcaacacacgaaaaggcggaaaacggaacgaagcagaaggacgccaac

SEQ ID NO: 243974 - RNA, 64 nt, Homo sapiens
ggcgccaccggcgccggaggccgaagaggcgcggccagcgaagaagacgcagccagacccggcg

SEQ ID NO: 243975 - RNA, 78 nt, Homo sapiens
ccggcggagacgggcggccggccgacccccgcgcgacggcgacgcgggaggccaggacagcccgcagaggaagagcag

SEQ ID NO: 243976 - RNA, 74 nt, Homo sapiens
aagggcacgggaagaccggaggggacgaagaacggagggaacggaaaaagcaacaaaacacaccaagaaaaggg

SEQ ID NO: 243977 - RNA, 108 nt, Homo sapiens
gcggcagggcagcagaagcgcaccccgacgccgaggaacgagagcgcgaagcaagggcgacagagaagagagaaggccccagcagcgggcacgcgccgagagcccgcc

SEQ ID NO: 243978 - RNA, 74 nt, Homo sapiens
aagccacaaacccgccaaaagcgacaggagcaaaagagaagaggcgaaagaagagggaaaagacgagcaggaga

SEQ ID NO: 243979 - RNA, 69 nt, Homo sapiens
gcagggcgccaaagcgagagagggaagcgcccggccggaggcaggggaaaggcggggaccgggcaaaga

SEQ ID NO: 243980 - RNA, 53 nt, Homo sapiens
acagacaggaagacgaggggcaaaaagcacaggagggcaggacccagcgcgag

SEQ ID NO: 243981 - RNA, 70 nt, Homo sapiens
agacgcggcgcgcgcggcaccaggccgggcgggcagcagcggcgcacaaaagcaggaaaggcagccgaca

SEQ ID NO: 243982 - RNA, 83 nt, Homo sapiens
accacgagcgcaagaggccgggggcagcacggaggggacggagcggagaggacgagagcccagggcggagcagccaccacgga

SEQ ID NO: 243983 - RNA, 83 nt, Homo sapiens
gcggccgagcgcggaggcgccccgcgcagcgcgcgcccaaggacgcgccagcggagcccggccccgcccggacgcggaggccg

SEQ ID NO: 243984 - RNA, 78 nt, Homo sapiens
cgccagcagggggcggaaagggcggaggacaagcaggcaaagcgaggggccgaaaagaaggacccaacaccgccccaa

SEQ ID NO: 243985 - RNA, 74 nt, Homo sapiens
aagacaccaccggaagcgccccccaggggaggaggcacacagccacccggagccaggaaagggcgcccgcggac

SEQ ID NO: 243986 - RNA, 40 nt, Homo sapiens
cgccaaccagacgcgcgggagaccacaacgaagcgaaaac

SEQ ID NO: 243987 - RNA, 73 nt, Homo sapiens
gaggaaaaccgacgaagggggaagaagagcgcaccgaaggcacaagggaaaccagaacaaaaggccagagccc

SEQ ID NO: 243988 - RNA, 80 nt, Homo sapiens
gaaaaagaaaaacgagaaagaagcccaaaagagccagagaaaagacacagacgacccagaacgaaggaaggaaagacgag

SEQ ID NO: 243989 - RNA, 82 nt, Homo sapiens
gcccgaaggccacgagacaccgcggcgcgaggaggggacagccccggcgggcaaacggccagcaccaagcagaaaccaggag

SEQ ID NO: 243990 - RNA, 70 nt, Homo sapiens
caggccaagggacgggaaacaccagcgaacccaacacgcagaaacaaggaggccagagaggagcccaccc

SEQ ID NO: 243991 - RNA, 80 nt, Homo sapiens
ccgagagcgggaacaggacgaaggagacgcaggagggagagcagccagaggaagaagaggaccaccgcacaaaaagcccg

SEQ ID NO: 243992 - RNA, 71 nt, Homo sapiens
ccagaaagccacgacccaccagagggagcaagcacggcacaaaccaacaaagagacaagccaccacgaagg

SEQ ID NO: 243993 - RNA, 80 nt, Homo sapiens
agggcggggaagaggcggcagccgaggccgcgaacgcacaggagaccagcccaccgcacccagggaaaaaacagcagcca

SEQ ID NO: 243994 - RNA, 34 nt, Homo sapiens
aagaacccccaaaaggagccgggggccccacccg

SEQ ID NO: 243995 - RNA, 82 nt, Homo sapiens
acccacaccggcggcaccggcggcggcgcgcagcggcaggcggagagacccgccgccaggaagaagagagggcgaaggaggc

SEQ ID NO: 243996 - RNA, 71 nt, Homo sapiens
ggagagcggccgacaccggaacaagagcaaacggcgaaaccggcacagaagcacgggacggagaaggaaag

SEQ ID NO: 243997 - RNA, 81 nt, Homo sapiens
ccaaaacaaacaacagggaaagacgacagcacaccagacagaggggaagagaagaaggcgagcacacagagaggggaaggg

SEQ ID NO: 243998 - RNA, 80 nt, Homo sapiens
ggccgagcagcggcgccaggagcccggcgcggcccgggcagccgcgccccaaaccaagccgccacagggagaaaagagca

SEQ ID NO: 243999 - RNA, 75 nt, Homo sapiens
gagccgggcgccacccgaggacaagaaagcagaccacacagacaaccgacccagcaagggacccccacgcgccca

SEQ ID NO: 244000 - RNA, 72 nt, Homo sapiens
acgcgacgcgagagaaggacccacggcgcgcgaaggcggggccggggagcccgggccagaccccccagaccc

SEQ ID NO: 244001 - RNA, 71 nt, Homo sapiens
cgaccccccggcgccgcgccggcggcgaacagcagcccccgacccagagccgagcccaccgcccggcgccc

SEQ ID NO: 244002 - RNA, 74 nt, Homo sapiens
ggggagggagcaaacaaggacaaccgaaaacgaacccaaaggagagcccgaagaaacgaccgagggccccagcc

SEQ ID NO: 244003 - RNA, 84 nt, Homo sapiens
gcggcggcgcgggcgagcggcgagccgaaaagcgagcgcgaggaaaaggcggcgggagccccccacgaccgaaagaggacagcg

SEQ ID NO: 244004 - RNA, 77 nt, Homo sapiens
ggcgggcgagcggcaggagcggcagccaggagcgccgggcccgcggagagcgggggaggcacaagccggggcaagag

SEQ ID NO: 244005 - RNA, 77 nt, Homo sapiens
gagagagaaagggaaagaggaggagaggggcgagcaggccggagggaccgggaagggcaacaaggacccagacaagg

SEQ ID NO: 244006 - RNA, 74 nt, Homo sapiens
caaacgaccaacagggcgccaaccccacggcaaacagaaaacgcagccgcagaaagccacgaagaaaacccagc

SEQ ID NO: 244007 - RNA, 73 nt, Homo sapiens
aggagccgcagccaaaagggaaaaggcagaaaggcccggaacacaaaacaggaaaagacccagcgacaacgaa

SEQ ID NO: 244008 - RNA, 71 nt, Homo sapiens
gggccaagcagagacacaaaaccggacccggaacaggccaaaagcaaacgacaaggagaaaaagaagcaga

SEQ ID NO: 244009 - RNA, 76 nt, Homo sapiens
caagggcagagggaacaggcagcaggaagcacggcgggcgaaacagagccagagcccagaggggagcagagggagg

SEQ ID NO: 244010 - RNA, 75 nt, Homo sapiens
gaagccggcagcacagccagaagggagaacagacccaccaacggcaagagagcagggcagggcgcaggaaaggag

SEQ ID NO: 244011 - RNA, 82 nt, Homo sapiens
ggaaacccacaggaggcaaccacacagaggagaaggaaggcagcaccgaaggcaccggcagaccagccggaggagacccgcg

SEQ ID NO: 244012 - RNA, 63 nt, Homo sapiens
acggaccaaacgggagagcgcagccaggagcaggaggcaagcagacacccgagaccgaacgca

SEQ ID NO: 244013 - RNA, 75 nt, Homo sapiens
aagagaagcgcaagagcaacaccccaccccaagggaaacacaaagaagacaccagaagggccagcaccacgacaa

SEQ ID NO: 244014 - RNA, 82 nt, Homo sapiens
cgggacgaaacaaaaacacacccagggaggcaagcagagcgcggccaagaacagaggaaggggaaccacaagcagcaaggcg

SEQ ID NO: 244015 - RNA, 70 nt, Homo sapiens
aaaaccaggggaaccaaacaagaaggagcgacgaaaggaagaagccaggggcgcggggcggggaggcggg

SEQ ID NO: 244016 - RNA, 75 nt, Homo sapiens
cagcagcggcccacgcagaacccgggagaggagaccagaacgaacccccccccccggagcccacgaaagggccag

SEQ ID NO: 244017 - RNA, 48 nt, Homo sapiens
ggcagacaaaagggccaaagaagggagagagacaccagccgcacccaa

SEQ ID NO: 244018 - RNA, 88 nt, Homo sapiens
ggcccgcgcgcccggccaagaggcaaaggggaggacgcagcaaaccaccagaagggagcagcagccccgagaaggaagaggaggaagc

SEQ ID NO: 244019 - RNA, 71 nt, Homo sapiens
aaggagcacgacggcaggaaggaggagacgaagaaaggagggaaagaaaggcaaagcgagcaagagggaga

SEQ ID NO: 244020 - RNA, 73 nt, Homo sapiens
agccgaggagacaccccagagaacacggcacggcagggaagccaggggacacgcgcccaccagggggagccag

SEQ ID NO: 244021 - RNA, 53 nt, Homo sapiens
cccagcggggagcacggcgagcagccaggccaggagagagagccaccaaagaa

SEQ ID NO: 244022 - RNA, 69 nt, Homo sapiens
aaagaccgcaccccgggccaggaaacaagcgccgaaaagcgaaaagaaacaagccgcggcaacagcgac

SEQ ID NO: 244023 - RNA, 77 nt, Homo sapiens
aaggagacggaccggagcgaagaaaccccggccaaggagaggcccgacagaaccacggaagaaagccagacacagaa

SEQ ID NO: 244024 - RNA, 71 nt, Homo sapiens
gaccaacaaacagaagggaagcaggaggacagggcaagagggagcgggagccaggccagaacggccgaagg

SEQ ID NO: 244025 - RNA, 80 nt, Homo sapiens
cccgggccgcgggagcggagcccccgggaccagacagggaggccgcacagaggaggagcaccaaaccgagggagggcagc

SEQ ID NO: 244026 - RNA, 87 nt, Homo sapiens
cgagaacggcgggaagagaagacacgagcacaaacgcgcagacgggacacggccggccaggagcggccgcaccacacccagagcaca

SEQ ID NO: 244027 - RNA, 63 nt, Homo sapiens
aagcacacagagcgaagcgcgaggagcagcagggaaagggagcagcaccggccacacccacag

SEQ ID NO: 244028 - RNA, 73 nt, Homo sapiens
agcagcagcagcacccacccacaggacgccagaaagagggcaacggccgacgaacaccgcccaacgcagccgc

SEQ ID NO: 244029 - RNA, 74 nt, Homo sapiens
gagagggaccacacagaaacggaacacagacaaccagggacacaccccgccaggcaggaagcaggaggacgaaa

SEQ ID NO: 244030 - RNA, 81 nt, Homo sapiens
agaaggagcaggcgcggcgcgagcccaaggccaaggacccccgccaccgcccaagaggaccggccgccggagaaccggggg

SEQ ID NO: 244031 - RNA, 35 nt, Homo sapiens
ggccggacccaaaaacccaacgcaggaggaccggc

SEQ ID NO: 244032 - RNA, 121 nt, Homo sapiens
cacgccgcagccagcagcacccccaaggcacaccagacggggccacgcagcacagaggacagaccagccggcccccaccgcacgagggcgggaagggccacagcaacgagagacagagccc

SEQ ID NO: 244033 - RNA, 115 nt, Homo sapiens
acggaaagacgaaaggagacaaagaccgggcgacgaggcacagcgcgcaagaagggagagacgccggagacgccagggcagcccccagagcaaagcggcccagaccgagaaaaca

SEQ ID NO: 244034 - RNA, 73 nt, Homo sapiens
cgaggagcgaaagccacccacaaacaaacacccacggaaccagagacgaaaaaccaaggcaaggaaaagaagc

SEQ ID NO: 244035 - RNA, 76 nt, Homo sapiens
ggaggaccggccccaggcgcgccacagccgagccgggggaaagcaggggagaaaagaaaagaaagacgggaaagaa

SEQ ID NO: 244036 - RNA, 79 nt, Homo sapiens
gcgccggccccccggcggagaagaagcgcggccgcaccggccaagagcggggacgggaaagagggcagaagcagcaaga

SEQ ID NO: 244037 - RNA, 49 nt, Homo sapiens
gcgccccacagaggggcgacggagccacagcgcccaaggcacaggcccg

SEQ ID NO: 244038 - RNA, 54 nt, Homo sapiens
ccaggcgcgcgcccacgccggcagagagaaacgacagaaagggcgggagaacaa

SEQ ID NO: 244039 - RNA, 78 nt, Homo sapiens
aagaacaaaggacaccacgcagaggcaaaccgacaccagcgacacaagcgcgagggaaccacagaggacaggcgaggg

SEQ ID NO: 244040 - RNA, 118 nt, Homo sapiens
cggaccgcggggcaagcggcacgcacccgacagggagagccaacacaaggaaggagaagaagcccaccaggaacggagaccccgaacaaggaaccaggccacgcagccccacacggag

SEQ ID NO: 244041 - RNA, 83 nt, Homo sapiens
cccccgacgccgaccggacagcggcacagaggagggagggcggagaacggaaaagcaccaggaagcagagaggaccgcagaag

SEQ ID NO: 244042 - RNA, 65 nt, Homo sapiens
ggcagccggccccgccggacgccgagcaccgccaaagcgcgggaaccgaaaagcgcaggccggag

SEQ ID NO: 244043 - RNA, 81 nt, Homo sapiens
cggccccagcccgaggagccggaccgagggaaacgcgcccgccgcgggcccggcaggagggcagcaaccagaagggcaaag

SEQ ID NO: 244044 - RNA, 74 nt, Homo sapiens
gaaggagaagcccaacaaagccccacagcagccagaaggaaaggaccacgccgcgaggcaaacgcaagggaaaa

SEQ ID NO: 244045 - RNA, 87 nt, Homo sapiens
aaaggacacaaaggacacgcacccaaaccaggacccaaaaaaggcaccgcgcaaggcaccagaagaaagaagagaccaagcgcacag

SEQ ID NO: 244046 - RNA, 77 nt, Homo sapiens
cacaaaaagggaagacgaaaacaaggcaccacaagccgaacagccagccagcaaaagaacagcagcaccagaagcag

SEQ ID NO: 244047 - RNA, 61 nt, Homo sapiens
caaacaggaggccagcaaagaaacacgcgaacacacacaggagaagccgcgggagcggaag

SEQ ID NO: 244048 - RNA, 72 nt, Homo sapiens
ggaaacgagcccagaaaaggaacagcgacacaaggacacggcacaaacgaggaacgccaagcggagcgacag

SEQ ID NO: 244049 - RNA, 60 nt, Homo sapiens
cccggcaagagccgaggcagaggcagcggaccgagcgcggcgcggggcgggcgacaaacc

SEQ ID NO: 244050 - RNA, 76 nt, Homo sapiens
gagaaccccccaggcgcagacgaagacggggcagaccgcagagagggcggcaaaaaacagggaacaaaaaaccaga

SEQ ID NO: 244051 - RNA, 81 nt, Homo sapiens
ggcgcccccggggcccaggcccggacccgcggccggcccggcgcggcccagcgccccagagccccaaaacccagaaggaag

SEQ ID NO: 244052 - RNA, 66 nt, Homo sapiens
accgcggcgggccacgcgcgacgccgcgcgaggggcgaacaggcaagggccaagacaagcccagag

SEQ ID NO: 244053 - RNA, 78 nt, Homo sapiens
agaacagaagcagccaggccgacccacgcggcccacagcacccagggcggcgccagggcggcccacggggcccacagc

SEQ ID NO: 244054 - RNA, 87 nt, Homo sapiens
gacgaagggggacacagaagaggaggaagaagggggaaagggaaaagaggaagagagaaacagagagaaggagaagagaaagacccc

SEQ ID NO: 244055 - RNA, 76 nt, Homo sapiens
gaagaacagagacagcagccaaacccccagacaaacgggcaagcaaaagaccgccaaaagaaaagcagcagagcgc

SEQ ID NO: 244056 - RNA, 93 nt, Homo sapiens
acgccccaccagcagcgccagaggcaccggccgaggcaaagcaaaagcagaccggaaaacccaccggcaagaccacacccgaggggagcccag

SEQ ID NO: 244057 - RNA, 73 nt, Homo sapiens
gagacagcgccagaaccacggcaaagggaacagcgggcagccgacccaccaccgagccacgaggcacaggccg

SEQ ID NO: 244058 - RNA, 77 nt, Homo sapiens
gaaggagcacaagacaggggggagacggacgaccccagcggcagcccccgacccaagccagagaaaacgaggaaggg

SEQ ID NO: 244059 - RNA, 77 nt, Homo sapiens
gcccccccccagaacgcggggcagacaccgcaaaagcagaaccggagagagcacagccgccagagccagagcgggca

SEQ ID NO: 244060 - RNA, 65 nt, Homo sapiens
aagcggaggcgcgcaggagccaagagaaggaacagaacagacaccaccgaaacgcgccaagcaga

SEQ ID NO: 244061 - RNA, 68 nt, Homo sapiens
cggccgggccaccaccacagcacaccaagcagccagggggaaacccgcccagggcgggagaccgccaa

SEQ ID NO: 244062 - RNA, 75 nt, Homo sapiens
gcaccgggacgacaccggggaccggacagggagccacggaaaggcagagacccaaggagcagacccgaaacagcg

SEQ ID NO: 244063 - RNA, 36 nt, Homo sapiens
agcaggcgcagacacacagagacccaagaaacgaga

SEQ ID NO: 244064 - RNA, 76 nt, Homo sapiens
caggaaaaaagcgagaaagacaagggaagaggaaaaagaacgccccgaacccagaaagccgcgaggaggacaggaa

SEQ ID NO: 244065 - RNA, 84 nt, Homo sapiens
aaaaagaaccagaccccgaaccgaccacaaagaagggaacagcaagaggcaaaagcgcgagggacagcgccagccgggagggcc

SEQ ID NO: 244066 - RNA, 76 nt, Homo sapiens
aaaggaaaaacacgacggagaaaaacggagggagaaaaagcaagaggaaagcacacccacaaaagcgaaaagccag

SEQ ID NO: 244067 - RNA, 76 nt, Homo sapiens
cgaaagcaggaccaaacgagccgaagaaacaccaagaacaggaagaagaacggccaaggaaaggccagcaccagac

SEQ ID NO: 244068 - RNA, 70 nt, Homo sapiens
agagcagaagaccaggcacgcccgagcaagggaccacgcagcacccaccaaaaaaaagaacagcccaacc

SEQ ID NO: 244069 - RNA, 34 nt, Homo sapiens
accgggggcccacaacagggagggacaacagaaa

SEQ ID NO: 244070 - RNA, 69 nt, Homo sapiens
aaaggccaagaaggcaggaaacccgaagaggggagaaaaggaacaagaaaacaacggaggaacaggagc

SEQ ID NO: 244071 - RNA, 82 nt, Homo sapiens
gcgaccacccggaacgaagacgaaaagccacgaagaaaaggggaaggaggcgaacaggaagaccagcccaggcccacagggg

SEQ ID NO: 244072 - RNA, 80 nt, Homo sapiens
cagccggcccggggaaagcggcgcgcgggaccgccaccgggcggggccgcggcggcggagcgccaaagggcggacggaag

SEQ ID NO: 244073 - RNA, 88 nt, Homo sapiens
gggacggcggcggcgcagccggaacccgccagggccagggccaggccagcgcccggcggcccaggggggcccacgcggaggacgcaga

SEQ ID NO: 244074 - RNA, 72 nt, Homo sapiens
aaagaaccggaaggaagagacagagaggaacgaacccccagggaccgacgaggagggccaagaacccggagg

SEQ ID NO: 244075 - RNA, 61 nt, Homo sapiens
accgcagaagaaggaggcaacagcggggcagagcccgaacacggcgcgaaacaaaccagac

SEQ ID NO: 244076 - RNA, 69 nt, Homo sapiens
aaaccaggagacacacgagaccggacaccccagaggacacggccacagcaccgagacaaccaagcaagg

SEQ ID NO: 244077 - RNA, 83 nt, Homo sapiens
ggaggcccacccgcagaggccagggcgcgccccagcacccgccccggggcaccacccccaagggcaagaaggaacagacaaaa

SEQ ID NO: 244078 - RNA, 70 nt, Homo sapiens
gggaaaagacggacaggagaaaaggaacccccgcgagccggggggggcacagagccccggaagacagccc

SEQ ID NO: 244079 - RNA, 104 nt, Homo sapiens
cgaagaccaggcaggcccacagcgccacagaaccgcccaaaaaggcaaagaaaccacgaggaccaagaagcaagagccagccagagaaccaccggaccacgagc

SEQ ID NO: 244080 - RNA, 81 nt, Homo sapiens
caaccacagggccacaaaggccggacaagcacacacaaaccacaagaaggggcgcgacggagagagccgggaggagagccg

SEQ ID NO: 244081 - RNA, 77 nt, Homo sapiens
ccaccgagacgaagcgggcggcgaaggaacaagaggcagaaacaacagcaagaaagaggcccgaaaaagacaccagc

SEQ ID NO: 244082 - RNA, 83 nt, Homo sapiens
ggcaagccccgcccggccaacaagcccggcagggcagagacacccaagacacccccagcaaagcagcagaccccagcaacaag

SEQ ID NO: 244083 - RNA, 120 nt, Homo sapiens
ccgcggcgcgcccgacggggcggccgggggccagagaccaaggcgcgcccggcgggccggaccaagagcccaaggcagcagcaccaggaaggaacgggacagcggagcagaggaccgagg

SEQ ID NO: 244084 - RNA, 76 nt, Homo sapiens
ggcccagggaggcaggggcagaaacagagaaggaacagggaccccgaaaccaagggcccacccacccggggcacag

SEQ ID NO: 244085 - RNA, 75 nt, Homo sapiens
caagaaccaagagcagaacccgaaagcgggaacccacaacgaaggaaggaacagaggcacagcgacgcaaaagga

SEQ ID NO: 244086 - RNA, 67 nt, Homo sapiens
gcagcgcccagcagcgcagacacaaccgaaaaagaagccgcaccaccacccaaacacggaaccggaa

SEQ ID NO: 244087 - RNA, 74 nt, Homo sapiens
agagcccaaacaccaccaccaaggaaagaccacagcaagaccacgcccccagccgggggaccaggccgaacgac

SEQ ID NO: 244088 - RNA, 92 nt, Homo sapiens
cgccgcccgagcgccgagaaagccccgggagaagcagcgccgcccggggcagaccaggcaggcccggcgaaagggggccaaacaacgaagag

SEQ ID NO: 244089 - RNA, 71 nt, Homo sapiens
cagaacggacaagcagaagaagaagggaccccaaaagagccaagcccagagaaacgaagagcgcgcgcaag

SEQ ID NO: 244090 - RNA, 58 nt, Homo sapiens
cggagccggggaccaggaggagcgcggcccccaggcgagccacgccaccgggcacgga

SEQ ID NO: 244091 - RNA, 78 nt, Homo sapiens
ccaccaccccgcgccagggagcgccgcggcggagcgggccccggggaagggaagcaggggcggggcgggcccagaagc

SEQ ID NO: 244092 - RNA, 73 nt, Homo sapiens
cagcccgcagcagcaaacgagccgaggacagagcagaagccggccgagagggagaaaagagcacaggcacagc

SEQ ID NO: 244093 - RNA, 80 nt, Homo sapiens
gcccgacgcaaaccaaggacggggaccgcacacccaagggcggaagaaacgggcagaacaccacggagaaggaagagagg

SEQ ID NO: 244094 - RNA, 60 nt, Homo sapiens
caaacggagccaggcacaagaaaacaaaaaacccagaaggggagaaagaacacggcgacg

SEQ ID NO: 244095 - RNA, 59 nt, Homo sapiens
caaaaaacacccaacgagagacaaaagacgaacgcgcagaagaagacaagagagaagcc

SEQ ID NO: 244096 - RNA, 83 nt, Homo sapiens
cccagcacggagggaccgcagagagaggcgcagaaggaccgggagcacagccgccgaggaggacgcgagagccgccagcaccg

SEQ ID NO: 244097 - RNA, 80 nt, Homo sapiens
cccgacagcagcacacccggccggcccagggagaacgcaaaaccaccacccccacaaaaaacgcagggagaaaaggacgc

SEQ ID NO: 244098 - RNA, 50 nt, Homo sapiens
acagggacaggcaggacaggcgggaaaacggcacaaggcgacgagggagg

SEQ ID NO: 244099 - RNA, 89 nt, Homo sapiens
gccaaacagaaggaggagcagaggggagaagcaagacggagcggaaagcccacgggccggcgccagcgccagcgaggaaccgaacccag

SEQ ID NO: 244100 - RNA, 54 nt, Homo sapiens
aaaagcagcccgccacaacgccgccggggcccagacaggggcagaccaaaaaaa

SEQ ID NO: 244101 - RNA, 79 nt, Homo sapiens
ggccacgcaccgagagcgcagggggcggccccccgcacccccggagcaggcgccagccggaagcccgagggcagcgccc

SEQ ID NO: 244102 - RNA, 38 nt, Homo sapiens
ccccagccgcccacaccgaggcaccccaaggaggacaa

SEQ ID NO: 244103 - RNA, 32 nt, Homo sapiens
aacgaccgggacggggcaggaccaaaggaaac

SEQ ID NO: 244104 - RNA, 74 nt, Homo sapiens
gggcgaaacacagcacccgaagccaaaggcagagaagcgacccggcgaccgacagagggcaggggcaagcacca

SEQ ID NO: 244105 - RNA, 61 nt, Homo sapiens
ggaggccccgccggggacccgaaaaaaaagggccaggccgggcccgaagagacaccagagc

SEQ ID NO: 244106 - RNA, 69 nt, Homo sapiens
acccagagggaacgccagcggcccgggagggaacaaagaggaacaggccaaaccagcagaccgaagcca

SEQ ID NO: 244107 - RNA, 40 nt, Homo sapiens
cgccccccagccaggaccggggagaaagaagcagccaagc

SEQ ID NO: 244108 - RNA, 80 nt, Homo sapiens
gagagccgaaggagcagcccaggaccgagaccggagcagccggggcggagcgggcacgacgacggagagaggaagaagac

SEQ ID NO: 244109 - RNA, 37 nt, Homo sapiens
ccagagcgaggacgccggcagagccgcccggacaaga

SEQ ID NO: 244110 - RNA, 71 nt, Homo sapiens
gggaaaggcacccaggggacaaaaaaggaacgagccggaaacgaaacagcgcagccaggaacaggacgaag

SEQ ID NO: 244111 - RNA, 88 nt, Homo sapiens
ccaaagaaaacaagagggccagaggaggacagcacgccagcacagagccacccagaaagaaaaagcggaacacccacgacagccaagg

SEQ ID NO: 244112 - RNA, 69 nt, Homo sapiens
gaagcggagagcaacagcgcgccgccaaaagcaggcccggcacggaggccgaagcccagggggcaggaa

SEQ ID NO: 244113 - RNA, 84 nt, Homo sapiens
ccggggccggcggccgaccgagaacgcagcaccacgacgcaaacagcagacggaagaccccacggcaaaaccacacccgaggcg

SEQ ID NO: 244114 - RNA, 106 nt, Homo sapiens
gccccgcgcaccaccccgacggccgaggacggggccgggagaagagcgaccccacaggagcacaaaagaacaaaagggaaaaaaggacggcagcacacaacaaaac

SEQ ID NO: 244115 - RNA, 69 nt, Homo sapiens
gagccgccccgcacaccagacaagacggccaaaggggacccagaccccaccaccgacccggggcaagag

SEQ ID NO: 244116 - RNA, 70 nt, Homo sapiens
agagaacaaacagacgaaggaaaggcggagcaacggagaacacacggagcaagacacgagcagggggcag

SEQ ID NO: 244117 - RNA, 77 nt, Homo sapiens
cgaagcagcaaacgaacagcgagagcgcaccagaaggcagggaaacaacgcgcgggccaggcacgacaccgcaacga

SEQ ID NO: 244118 - RNA, 109 nt, Homo sapiens
gcgaccaaccacaaggccgggcggacgcagggcaccccgaagagaagagcagcagcggagggcaccggcgcacccgggacgaacgccaggacgagccccagaagcgcac

SEQ ID NO: 244119 - RNA, 66 nt, Homo sapiens
agcaagcagagagggcaccagaaagccgcgagcgccacgagaagaaggcgggacccagccccccaa

SEQ ID NO: 244120 - RNA, 85 nt, Homo sapiens
gccgccgcgccccggccgcccgacagggcccaggaaccacccagggaagacgaggggcgaggaggagaagccacagaaagcggcc

SEQ ID NO: 244121 - RNA, 75 nt, Homo sapiens
agaggcgcaaggaccggagagcaccagcagcacaagcaggggagacaccgccccacagaagaacaccggagagcg

SEQ ID NO: 244122 - RNA, 92 nt, Homo sapiens
aagcagaagaaaaggagaaggaaagcgaaggggaaggcgccgaagaggacgaagggcgagacagcaaagaggcagcccggaagagaaagaaa

SEQ ID NO: 244123 - RNA, 54 nt, Homo sapiens
caggagcgaaaacccacgcaggagaacgaacgaagcgaagaagggacgaagaaa

SEQ ID NO: 244124 - RNA, 83 nt, Homo sapiens
ggcagcggagggacggcagccgcgcgcggaaagagaaagcagagggagcacacaaagggcaggagggccgggagacacaaggg

SEQ ID NO: 244125 - RNA, 59 nt, Homo sapiens
gcacagaacaggacccaggaccagagaagccaagcacacagagcagcagaagagggcag

SEQ ID NO: 244126 - RNA, 69 nt, Homo sapiens
acaacaacagcggcacgccgagcaaggaggagggggccacagggcaacggggcccgcaggcccccaccg

SEQ ID NO: 244127 - RNA, 71 nt, Homo sapiens
gaaggaccaagaaccagcaaggcgccaccggaagaaacgggaggggaggagccgggaaagacagcgccaag

SEQ ID NO: 244128 - RNA, 70 nt, Homo sapiens
ccgacgccaggcagcgcccccaaacggcaacagcaagagaaaagcccacagaagaggggccgaggcagca

SEQ ID NO: 244129 - RNA, 84 nt, Homo sapiens
gccccagagcggggaacagaaggccccagcagagcagaaaagaggaacgcggcaggcaaagaggcaaagagcgcgggcggccag

SEQ ID NO: 244130 - RNA, 71 nt, Homo sapiens
aaagaccacggacagcaggcccacacccaggaaagagcacgaaacaaagcaggacaaggcggacccaggcg

SEQ ID NO: 244131 - RNA, 41 nt, Homo sapiens
gggagccgacagccgcgccggggcgaaccgaccaagaacaa

SEQ ID NO: 244132 - RNA, 69 nt, Homo sapiens
ccacggaaagcagccccgcaggagaagcgaaaagaaacccaagaagagcggcagcggcgaggggaccgc

SEQ ID NO: 244133 - RNA, 74 nt, Homo sapiens
caacggaaagccaacagaaaagcaaagcaggcaaagaggcaacccaaagccccagcacagccacagcaagagcc

SEQ ID NO: 244134 - RNA, 72 nt, Homo sapiens
ccacaaaggagcccaaccagagcggagcgcagaccgaggaaaaggagagaggcagcaaaagaagcaggaccc

SEQ ID NO: 244135 - RNA, 34 nt, Homo sapiens
aacagcccaacaacacccaagaggaagaagacac

SEQ ID NO: 244136 - RNA, 55 nt, Homo sapiens
cggcggcgggccggacccggcaggacccgagcggggaccgagaaagacccccgag

SEQ ID NO: 244137 - RNA, 76 nt, Homo sapiens
aaacaccaggaaagacaggagaccaaaaagggcccgccccaccgggggccaccccagggaggagaagagggaccca

SEQ ID NO: 244138 - RNA, 77 nt, Homo sapiens
cacagccaggaccaagccaggccggcaacgccgcaggccaacggcagcggcgaaggagaccgcccaaaccacccccc

SEQ ID NO: 244139 - RNA, 77 nt, Homo sapiens
gcaagcagcacacaagccagccggacagcaacaggcaaggcaaggaggaccaagcgaaaaacccagaagaaacagac

SEQ ID NO: 244140 - RNA, 76 nt, Homo sapiens
cccaccacacagcaacggacaaagggcggagaacggaaaagcaccaggaagcagagaggaccgcagaagggaagga

SEQ ID NO: 244141 - RNA, 37 nt, Homo sapiens
ccccggaacggcaccacaaggggcgccacaccaacaa

SEQ ID NO: 244142 - RNA, 68 nt, Homo sapiens
gcagcgcgaccgggaggcccaggagcggaggcagcagaggccgcaggaagcgggagccagccaccagg

SEQ ID NO: 244143 - RNA, 79 nt, Homo sapiens
gcgaccaaggccaagagagaggggaccaccaccagcaagcgcccgacccagccagacggcaccagcgcccggagaacca

SEQ ID NO: 244144 - RNA, 53 nt, Homo sapiens
aaaagaaggcaagcgccgacacacccagagaaaacccaggacaacccgaaagg

SEQ ID NO: 244145 - RNA, 86 nt, Homo sapiens
gaagcaaaagacagcgaggagcagcagcagcccagcaggcgcggcccgccaggaggcacggacaaaacgcagggccagcaaacccg

SEQ ID NO: 244146 - RNA, 110 nt, Homo sapiens
gcacgagccaggaacgcgcagccccgagcgccgcggacgcgcacgagggacggggaaagggcggagaacggaaaagcaccaggaagcagagaggaccgcagaagggaagg

SEQ ID NO: 244147 - RNA, 75 nt, Homo sapiens
cagccgccaggacccaacgcccgcgccgccgcaaaggcgaaggcaacaccaggagaagcggggggcagagggcag

SEQ ID NO: 244148 - RNA, 57 nt, Homo sapiens
caagagggaccacgaaaaagcccggggagcgaagggcagccaaaaacagacggagaa

SEQ ID NO: 244149 - RNA, 41 nt, Homo sapiens
agcccaccggacccgggcgggcgaagagagccccggaccgg

SEQ ID NO: 244150 - RNA, 74 nt, Homo sapiens
cccccccagccccagcacccccaaccacagaggcagagcaacagggacacaagcaagaagaaagggaccgacag

SEQ ID NO: 244151 - RNA, 76 nt, Homo sapiens
aggaggccccccagccacggaaacccaaaagaagaacccggacccgaccgaagcaagaacgcaaaaggcacaagca

SEQ ID NO: 244152 - RNA, 80 nt, Homo sapiens
aagaaaccgcaggaaacgagccgggaacgcccaaaacccgccggaccgaagaaggggcaagcaccaaccccaaaaggaca

SEQ ID NO: 244153 - RNA, 84 nt, Homo sapiens
ccaggcccgggcgccgacaggagggcaagacgggacgccggacaggagcaccagcccccggcgcggagcgggggccacgggcac

SEQ ID NO: 244154 - RNA, 58 nt, Homo sapiens
gggaggaacggcccggaaacaggaggacgggccccgcggcggacgcccccggggcaca

SEQ ID NO: 244155 - RNA, 76 nt, Homo sapiens
gggggcggccgggacggaggacgcgcagaagcaagagagcgccgacaaaggccgaagccccgaaggaagccacaac

SEQ ID NO: 244156 - RNA, 70 nt, Homo sapiens
gcagagagagagcggaacgggagaaagcacgggaggagaggaagcccggggcggcgacggagcacgaccc

SEQ ID NO: 244157 - RNA, 76 nt, Homo sapiens
acggcgcaggaccggggaaccgccaaagcccgggcgcggaagaagccaaggaaaaagaacgaccaggacacagagc

SEQ ID NO: 244158 - RNA, 81 nt, Homo sapiens
cacaccccggaaacggacaacaggaaagagacaaagcaggaggacacaagaagggaggaaaggcggacccaggaaccacca

SEQ ID NO: 244159 - RNA, 65 nt, Homo sapiens
gcagaaaaacaaaaggagccggcgaacaagaggcgccagcgggcgcgccggaagaacagcgccac

SEQ ID NO: 244160 - RNA, 77 nt, Homo sapiens
ccgccagaccccgggaggacgaccagcccccggagccccgggcagcagcacaccgcccagaaaaagcggaggcgggc

SEQ ID NO: 244161 - RNA, 69 nt, Homo sapiens
cagcaaagaccccaggcaagagaggaggcgcaggaggagccacgccgaagggagcaggggcccaaaaaa

SEQ ID NO: 244162 - RNA, 42 nt, Homo sapiens
caggaggcagagccaaacacccagcggaacacgggcaacggg

SEQ ID NO: 244163 - RNA, 71 nt, Homo sapiens
agaagcaggcacagaaggcgccaggagaaacaaggcgaacggggcggagccgagcgaggccccagaaggac

SEQ ID NO: 244164 - RNA, 83 nt, Homo sapiens
agcgagcgcaaccggagggccgggacccgcagccacggaccgcccaaccgcgacgccgagagcgggaacagcccacggcgacc

SEQ ID NO: 244165 - RNA, 76 nt, Homo sapiens
caagcccagaaaggacacaaaagagaggcagaaaccacagaggaaaaggccgcgccggaccagccagcccgccaga

SEQ ID NO: 244166 - RNA, 77 nt, Homo sapiens
cgccgcaggggaccggccgggccggaggcaaggggccagaggacagaggacaggaccagaacagagaagaaagcagg

SEQ ID NO: 244167 - RNA, 81 nt, Homo sapiens
cgcagcggcgcagcccacgccagacgaccccacccgcgccgcgacccggagaaccagggcacagcgcagcggagcgaggaa

SEQ ID NO: 244168 - RNA, 74 nt, Homo sapiens
gcaacccagagagaaagccaagcagcagacaggggacacaagcagacaagacccagacggagaagacacgaaac

SEQ ID NO: 244169 - RNA, 71 nt, Homo sapiens
ccaggccaggagaggccagcaacagaagaaagcaagcaccggggaaagcggcccgaaacaagcagaaggga

SEQ ID NO: 244170 - RNA, 57 nt, Homo sapiens
gcgccgccggagcccacaaccaccgaagaccaccagccagggaccgacccagccccc

SEQ ID NO: 244171 - RNA, 65 nt, Homo sapiens
gcaagacggcaggcgagagccgacccaggccgccggccccacaggccacaaggagaagagaagga

SEQ ID NO: 244172 - RNA, 86 nt, Homo sapiens
agagccaaccgagggcgccgagaagccagcacgccgggagcggacacagcccaggacaggaccacgccaacgagggaggccaccag

SEQ ID NO: 244173 - RNA, 52 nt, Homo sapiens
cagccaggcccccacgcgaagcaccgagccaggcaagaacggaagcacgggc

SEQ ID NO: 244174 - RNA, 104 nt, Homo sapiens
cgcccgggccagcggccgcgcacccccggccggaggcaccagcagagcagcaccagcagaagagggcccgaccacggcaacccagaggcgaagcaggacacccg

SEQ ID NO: 244175 - RNA, 82 nt, Homo sapiens
gcgcggagccccggcggccaccccggggccgggcagaagggcccagaaaagcacgaaacacaaagcaaaacggagaaggacg

SEQ ID NO: 244176 - RNA, 73 nt, Homo sapiens
gagcggaggaggcgccagcagcccggagggagagcacaacaggaaccagagaaacaaggagccaggcgcagag

SEQ ID NO: 244177 - RNA, 61 nt, Homo sapiens
gcgggagccgaaaacggaagacacgaacgcgggaggagaccaaacccgacaaggcaggcca

SEQ ID NO: 244178 - RNA, 54 nt, Homo sapiens
gcacaccggccccacgcacgacgagagggacagcacgcggaaaagcggcgacaa

SEQ ID NO: 244179 - RNA, 71 nt, Homo sapiens
cacaagggcaccacaaaggcgaggcccgacggacagccacaaggaggacccagcccccacagcaaaacaac

SEQ ID NO: 244180 - RNA, 101 nt, Homo sapiens
gaggagagggccccacaccaagcggggaggcgcccccaacagccgcagcaagcagagcccggacaggcccgccaccggggcacgggcgccccccggaagcg

SEQ ID NO: 244181 - RNA, 64 nt, Homo sapiens
aaacagacggggaaaaaggcgccccagaacaggaccccgacaacagagcagccccgccagcaag

SEQ ID NO: 244182 - RNA, 77 nt, Homo sapiens
gaaagaaaaacaagaacgaggaacacgaacaggaacccgcaggcccaggaaagcccgaaaaggaccagcgaagcaag

SEQ ID NO: 244183 - RNA, 71 nt, Homo sapiens
ggaaagcgcacgcagggcgcggaggggccggcccccggagcgacagaaacaagggagacgggcagacaacg

SEQ ID NO: 244184 - RNA, 79 nt, Homo sapiens
agcaaaagccgaacgagggcgcagaaaggggggcagagccacgacgggcacagggcaaggccagagaaggcgggagaaa

SEQ ID NO: 244185 - RNA, 84 nt, Homo sapiens
acagcagcgccgcccgccgacagccaggcccgggagaaaaagacgcgccagcaggcaacaaaaccaaggggaccaaaagcagag

SEQ ID NO: 244186 - RNA, 88 nt, Homo sapiens
agcaggccgcacacggacagaccccaggccggcggcccccagccgccgcccacgcagcagggacagcagcagggaagcggccgcggcc

SEQ ID NO: 244187 - RNA, 84 nt, Homo sapiens
ggaccggccgcccagcgccgccccaggcccgggccgcgccaggagccgccccccccagaaccagcagaagacacccaaacgaaa

SEQ ID NO: 244188 - RNA, 79 nt, Homo sapiens
aacaggaccagaacagagaagaaagcagggacacggaggaccgaggaagaaggcacgaccgacacaagaagcgcgggcc

SEQ ID NO: 244189 - RNA, 74 nt, Homo sapiens
gcgaggacgaggaacggcgaacccccggggccagccccccgaggcagccgcggccggccgccgccgggccacag

SEQ ID NO: 244190 - RNA, 79 nt, Homo sapiens
ggaaaaaacccagagccccagaacccaggaaagaaaagaacccagacaagaggcaccacagaagacagaggagcccagc

SEQ ID NO: 244191 - RNA, 72 nt, Homo sapiens
aacagagcaaggagagccggaggagccaccaacagaagcaggagccaggaaaccaaaacccacagagaggga

SEQ ID NO: 244192 - RNA, 79 nt, Homo sapiens
gcacaacgaaaaaccgagcggacaaagcccccgccgggagcgccagccacgagcccagggacccagcagccagccccgc

SEQ ID NO: 244193 - RNA, 76 nt, Homo sapiens
cggaaggaccacagcaaaccggggcaccaacaaggccaacaaagcccaagcaggggaaggcgaagcacgacagcac

SEQ ID NO: 244194 - RNA, 77 nt, Homo sapiens
aggaggaagggggcggaaggagaacaaagggagaagaggaagcccgacaacgaagcaggcaacaggaagaagaaccc

SEQ ID NO: 244195 - RNA, 76 nt, Homo sapiens
ccaccagaaagacagaaaaggacggaaaagaagggcgaaaagccaggagcaaaagacgagcgcgacgccaccagca

SEQ ID NO: 244196 - RNA, 79 nt, Homo sapiens
cgcagggcgcccccgggccgcggccagagggcagaaccgcgccccgagggagccgcgcccgcgggccccaccgacccga

SEQ ID NO: 244197 - RNA, 76 nt, Homo sapiens
ccggcggcgggaggagcagggcggagcccccagcccccgcgaaggcgagcagaacaaggagaaagaccaagcacac

SEQ ID NO: 244198 - RNA, 83 nt, Homo sapiens
acaagacgagaagaggagagggagagggcccaggcggaagagcaagagaagaccccacagaaaccagaggagccaccgcaccc

SEQ ID NO: 244199 - RNA, 76 nt, Homo sapiens
ggacgccacagagggaagaccccaaggagaagacacggaagagacaaagcacaaaaaaaaacaaaccaagacgaca

SEQ ID NO: 244200 - RNA, 79 nt, Homo sapiens
aagaagaggggagacgcagcccggcaccaccccagagaccgcgccacccgacgacgccacccacaaagaagcaagcccg

SEQ ID NO: 244201 - RNA, 58 nt, Homo sapiens
aggagaagggcaagacgccggggacccgaccacaggggaggaccgcacacagcagcac

SEQ ID NO: 244202 - RNA, 104 nt, Homo sapiens
acggccaaaacgggccccaggggacagccgggagaggaacagaagcagaccaaaaagggcagccgcagaagccaaaggaagccccacaaaggcccagcggggag

SEQ ID NO: 244203 - RNA, 68 nt, Homo sapiens
acagagcaaaagcccagggaaaggacccaaacaggcggcagccaagacacgggaaccagcaaccggca

SEQ ID NO: 244204 - RNA, 77 nt, Homo sapiens
gagaaaggacacacgaaaacagacgggggaacaagagacaagccaggagcccggaagacagccgcagggcagacacc

SEQ ID NO: 244205 - RNA, 76 nt, Homo sapiens
cagacacggggaagcgcaaaaacaagacggggcgccccacagaggggcgacgacaacaggaaggaagccaccgcac

SEQ ID NO: 244206 - RNA, 89 nt, Homo sapiens
ccagagagcgacccggggggagcgcggggcgacgcggcgcagggacccgggacagcggagagagagaagaagaaggaggccgcggccag

SEQ ID NO: 244207 - RNA, 78 nt, Homo sapiens
agcgaaggaaaacgacagaggcgaagacaaaaaaagagcggaggcccaaagggccccagcccaaccagagcgaccagg

SEQ ID NO: 244208 - RNA, 60 nt, Homo sapiens
acccagaacaacaaagagaggaagaacgcgcccaagcaaggaacggggcccccggggccc

SEQ ID NO: 244209 - RNA, 81 nt, Homo sapiens
gaccaacaaggaccagaaaggagggccccagccccaagcccccagggaggggaaagcaaccacacggcagcagcaggcccc

SEQ ID NO: 244210 - RNA, 55 nt, Homo sapiens
gagaggaacgccccccgggcggcggggagggagaggacagcagcggacggccgga

SEQ ID NO: 244211 - RNA, 76 nt, Homo sapiens
ggaagggaagccacccacaagacaacacgagagcccggagccgagcccgggaaggcggagaaccaccaaaggacga

SEQ ID NO: 244212 - RNA, 72 nt, Homo sapiens
cgagaggggggccgaggccggcgcgcgcgcacgcggcacaacagaaaagagagcccaggagagcaagaagaa

SEQ ID NO: 244213 - RNA, 73 nt, Homo sapiens
aaaccggagccagaaacaaccgcaaccacccaacaagccgcaaggagcggccaaagcacggaccacggaccca

SEQ ID NO: 244214 - RNA, 76 nt, Homo sapiens
acgccacaccaacccagaagggccacagaaggcagaaacccccaaaccgaaggcagcccagagcacaaccaaagcc

SEQ ID NO: 244215 - RNA, 81 nt, Homo sapiens
agcaccagaaaggacaaggcggaagaacaaagacgcagggggagccaaaggcgaagcgaagagcaaggggaacaaagcggc

SEQ ID NO: 244216 - RNA, 84 nt, Homo sapiens
ccgaggggcggcggccccaggcaaaagcagaccggaaaacccaccggcaagaccacacccgaggggagcccaggacaccacgaa

SEQ ID NO: 244217 - RNA, 80 nt, Homo sapiens
ggaaaggaacacagacagagacaaggcgaagcagaaaccaagcggagggaccgacgcagaagaagaacccgggaacagcg

SEQ ID NO: 244218 - RNA, 74 nt, Homo sapiens
cacagagacacaacccagagaccacagagagcccagaagaccaaagaaaaaaagaagggggacgaagccagaac

SEQ ID NO: 244219 - RNA, 70 nt, Homo sapiens
ggaccagccgggaccaagaggccggaggcaaggggaggagacgccggaaacacgaggccccagccgaaca

SEQ ID NO: 244220 - RNA, 75 nt, Homo sapiens
cagccagggaaccacggagcacgagaaaacggcgggacacccagcaaggaggacgaagaccaagcaggcaaaaaa

SEQ ID NO: 244221 - RNA, 81 nt, Homo sapiens
gcggccgggaacgaccgaaacaccagggacccggcagcaaccccaacaaacgccagaggcagccccccccgggagacaccc

SEQ ID NO: 244222 - RNA, 89 nt, Homo sapiens
aggcagaagcaaagcaagaccaagcccccagacgaaccggcccagacaagaagacacaaggcagaagcccaggcgagagcccgcccccc

SEQ ID NO: 244223 - RNA, 71 nt, Homo sapiens
cgggcccccacagcccggacaagaccacagccccaccagcgccaacccacggggccagacacgcgaagcca

SEQ ID NO: 244224 - RNA, 67 nt, Homo sapiens
agcacagcacccacaaagcaacgacaacgaagagaggaaagaagcggaaaggagggagcacacaaca

SEQ ID NO: 244225 - RNA, 78 nt, Homo sapiens
agaagcaacagggaagcacaaggagggaaggacaagcccacaaggcaggcagaggggcagccagcgccgcccggcaca

SEQ ID NO: 244226 - RNA, 83 nt, Homo sapiens
cagccgacgccgggcacaggggggaggggaacagcagcggagaacacggcagagacaaaacggaccaccgcgacagaaacagg

SEQ ID NO: 244227 - RNA, 78 nt, Homo sapiens
cagcacccccagccccacccaccgccaggagcccccccagaggacggaaggcccacgccccgaagacaaaggaagcgc

SEQ ID NO: 244228 - RNA, 68 nt, Homo sapiens
agaaacaaaagacagcacaaagaagccgagacaaacggcaccaagagggacagagcgaagaacccccc

SEQ ID NO: 244229 - RNA, 70 nt, Homo sapiens
cgggcccgagcgggccgcgagagaagagaccaagcaggaaagagccaggaaaagggagaagacaaaggaa

SEQ ID NO: 244230 - RNA, 83 nt, Homo sapiens
ccagaccacgcagccacgcgggcgagcggcggggagcggcgaagccgcgggcgagggaagaagcccagcggaggcgaacggcc

SEQ ID NO: 244231 - RNA, 83 nt, Homo sapiens
gcggccagcagcagcagagcaggcagggcagaagaaaagaggagacacaccgaagaaacaacagagagccaacagaagggaag

SEQ ID NO: 244232 - RNA, 56 nt, Homo sapiens
cggaagccgacagacaaccagccccagcagagaccagagaagccccccaccagccc

SEQ ID NO: 244233 - RNA, 64 nt, Homo sapiens
ccacccggccccgccgagcgcgccggaccggcgcccggacaacccggcgacaacgaagcagacg

SEQ ID NO: 244234 - RNA, 81 nt, Homo sapiens
ggacggcgagaaggcggcgcgcgaggcaagcgcgcgccgagcacagacaaacgaaggacagagagaacaccgaaagagcca

SEQ ID NO: 244235 - RNA, 65 nt, Homo sapiens
gggagcggaagggcagcgccaacagaaacggcagacccaccgaccaacaaagaaacaacccaaaa

SEQ ID NO: 244236 - RNA, 78 nt, Homo sapiens
cggcaccggcgagccgggacgcgcggaacaaggaaacccaccgagggaggcccccccccacaaggcccgcaagcacca

SEQ ID NO: 244237 - RNA, 84 nt, Homo sapiens
agccccccagagcgggacacaggacagcggcccaaagcaagacccgacacagaccccgcacccacgaacaaccaaggcacccac

SEQ ID NO: 244238 - RNA, 97 nt, Homo sapiens
acggcccgagacacaccaggccggcaggcgagaaaagcgagaccgcggcgaggaccggggcaaagagaaccaggagaccccaccaccacagaaaaag

SEQ ID NO: 244239 - RNA, 83 nt, Homo sapiens
ggagcaggggaaggaacgggccgaaccgggagcgaggaaccagaacgaaaagcgccagaaagggcacaagagacaagccccgg

SEQ ID NO: 244240 - RNA, 89 nt, Homo sapiens
aggcgggaggcggcggccgcggcggcgcgcgcgcaggggacaggggcggcgaccggcggcgccgaggaggcagagcgaaggaaaaccag

SEQ ID NO: 244241 - RNA, 72 nt, Homo sapiens
aaaaagaagacgagaacggaagaaaccgccccagacagaccggaaagagaagccaccgcgaagcggggcacc

SEQ ID NO: 244242 - RNA, 68 nt, Homo sapiens
aagaacaaccgcggacacggagaggaaggacccacaggagaaacaccagcgagcagagggaaagccgc

SEQ ID NO: 244243 - RNA, 68 nt, Homo sapiens
cgccgagggcgagacggcaggagccaccaacagagccaggagccaggaagcagcagccacacccgcag

SEQ ID NO: 244244 - RNA, 71 nt, Homo sapiens
agaccaccaccaccccagaaacagacagggagaacggaaaaaacaaagcgaaacagcggggccacccagaa

SEQ ID NO: 244245 - RNA, 80 nt, Homo sapiens
gccgcacaaaccagggccgccagaagccaggcccaacaaggcgcaccgagcaccacgacgggagcgccaagcccaacgcc

SEQ ID NO: 244246 - RNA, 57 nt, Homo sapiens
cggcccccacccaaggagaggccaaggaccagaggaaggcggggaggcggaagacca

SEQ ID NO: 244247 - RNA, 79 nt, Homo sapiens
gccgcgggcgacgggccgagcagcagccgcccaaaacacaaaccaaagaagaaacccgaaggaccacagagaaccaaaa

SEQ ID NO: 244248 - RNA, 84 nt, Homo sapiens
gagcgcgaaggccgggacccggccccggcccacaggggggggcaaacccgagagaacggaagaaccggaagcccagccagggac

SEQ ID NO: 244249 - RNA, 72 nt, Homo sapiens
gcgcggcggcaagcggggcgggagccgcagccaacgaaagaaggcgccgcaaggaaacagaaggcacaagcc

SEQ ID NO: 244250 - RNA, 78 nt, Homo sapiens
cgggggcagcaggggacccgacacccccccccaccgaaccgcgggagcccaagacgaaggggccacggaagaagagcg

SEQ ID NO: 244251 - RNA, 76 nt, Homo sapiens
gaagcaggcacgacagagcgggagccagccgggggaccacaggcggacaggacaagggagagacagagcgacagag

SEQ ID NO: 244252 - RNA, 75 nt, Homo sapiens
gcaagcagagcccaaccccccagcagcacaagaccaccaacccaacggcaagcgaccagagccacagaacaagcc

SEQ ID NO: 244253 - RNA, 59 nt, Homo sapiens
aaagaaggaaacagggaaaccccagaagaggagggcacagaaggaaggaaaccaccacc

SEQ ID NO: 244254 - RNA, 33 nt, Homo sapiens
ccgggaccgagacagcaccaggccaaccaagga

SEQ ID NO: 244255 - RNA, 78 nt, Homo sapiens
aacagcacggcgggccccagcccgacccagaagaagaagggcaagaagacacagaagcacaaacagcaaaaaccgcgg

SEQ ID NO: 244256 - RNA, 67 nt, Homo sapiens
cgaaaccaagccggacccgaagaccagcagaaggccggagccccgggaccgcaccggcaccgcagcg

SEQ ID NO: 244257 - RNA, 78 nt, Homo sapiens
ggcgcgcccagaagaagggaaggcgcgaggaggaaaggaggacgaggcacgcgagaaggggagggggagaaagaagag

SEQ ID NO: 244258 - RNA, 60 nt, Homo sapiens
aaaccagaagaggagggcccagaagaaaaaggcacgagaagagaagcccagagcaaaaca

SEQ ID NO: 244259 - RNA, 81 nt, Homo sapiens
caacagggcaaaggccccgacaggaaagacaggagagagggagaaagagcgccagaaagaggggacagacagaagcgaaga

SEQ ID NO: 244260 - RNA, 74 nt, Homo sapiens
gccccggcgggccgcgccgggacggcccaccagccaccccaccgcgcagggaggcagacagagggcagccccgc

SEQ ID NO: 244261 - RNA, 81 nt, Homo sapiens
cgaccaagccgacccaccacacaagacggaaaaagcgacggagcccccccccggaacgagagcccagacagagaaagcaga

SEQ ID NO: 244262 - RNA, 74 nt, Homo sapiens
gaacgcccaaccgcagaccgccaccagcccagggaaagacaaggagccgggccgagaaaccgaaccagagacca

SEQ ID NO: 244263 - RNA, 62 nt, Homo sapiens
aggaaccaggacacagaaagcaaggcaggaggaggaagcccccccacacacaaaagggcaag

SEQ ID NO: 244264 - RNA, 84 nt, Homo sapiens
caacagcagcagcagagaccagcaggacagaccgggaggcgaggcaggagaacgcgaaccggagaggcggacggcaggagccga

SEQ ID NO: 244265 - RNA, 72 nt, Homo sapiens
gagagggaagccccggaaccagcgagagacaccaaagaaaaacggcagcagccaagcacgcaaccaagaggg

SEQ ID NO: 244266 - RNA, 69 nt, Homo sapiens
gggcgcaacaagggaggccagcggacgagagaccccagggaccaccgcaagaccgcacaggaagagggc

SEQ ID NO: 244267 - RNA, 74 nt, Homo sapiens
ccgagcccgggaaggcggagccggaggagccaccaacagaagcaggagccaggaaaccaaaacccacagagagg

SEQ ID NO: 244268 - RNA, 61 nt, Homo sapiens
gaagaacgggcgcagggaccaaggacagagcgggagccaccagcgccaaagggaagccagg

SEQ ID NO: 244269 - RNA, 79 nt, Homo sapiens
gcccggaggagcagcgccaagaccgccggacccggggcgccgcggcccggcacgcaccgggacagagccacggggaagg

SEQ ID NO: 244270 - RNA, 61 nt, Homo sapiens
cggaggaccgggaggccccgggcgcgggggcggagaacggaaaagcaccaggaagcagaga

SEQ ID NO: 244271 - RNA, 79 nt, Homo sapiens
aagcagcgaagacggaggcagcccacacggaacaaggaagagcgaaagagagaagcgacaagggaccaggaaagcgaag

SEQ ID NO: 244272 - RNA, 70 nt, Homo sapiens
gccggaacccacgcgcccgggagcacgagagccaacggcacgggaaagaccccacccaacccccgagaag

SEQ ID NO: 244273 - RNA, 82 nt, Homo sapiens
cgaggggcagaaagagaccgcagagacagccaacacggcacccacagacgacaaaggaagcgacaggagagacggcccagcc

SEQ ID NO: 244274 - RNA, 82 nt, Homo sapiens
ggcggggcggcagccgaccggccaccccaagcaagcagggagaagaaaggggaccggggacacacccacgaacacaaagggc

SEQ ID NO: 244275 - RNA, 31 nt, Homo sapiens
cccagcccaccccggacgccgccagccaccg

SEQ ID NO: 244276 - RNA, 69 nt, Homo sapiens
gaaacgaccggcagggagggaaggcaagagccaacccaaaaccaagcgggagggcccccaagacccaac

SEQ ID NO: 244277 - RNA, 63 nt, Homo sapiens
gcgcgcccagggagcccgccccagggggagcggcagcgaggcaaggaagcccaaagggagaac

SEQ ID NO: 244278 - RNA, 72 nt, Homo sapiens
gggaaagacccgcaccgccaggaacgaaacgcgaagacaggggacggaaggcaaggagcgaaaaccccagaa

SEQ ID NO: 244279 - RNA, 53 nt, Homo sapiens
aaacacagcgcaggaaaagacccaccccaaggacgaagccaagaggcgaccag

SEQ ID NO: 244280 - RNA, 75 nt, Homo sapiens
cggcccacagcaggacggaagcgagggcacgggcggcagcccgagaccgcagcagagacgccccacaaccgcccg

SEQ ID NO: 244281 - RNA, 62 nt, Homo sapiens
cacagggaaaaaccaaagccccgcgcaaagaccgcagaggccacccggagaaaggccacggc

SEQ ID NO: 244282 - RNA, 67 nt, Homo sapiens
acagggaagaaaagagaaaccacccacgggaaggacacaagaagaagcggaggaagccacgagaacc

SEQ ID NO: 244283 - RNA, 61 nt, Homo sapiens
gaccggagccgcccaggacggcaggggaccgcacagccgaaaaggaaaaggagccagggcg

SEQ ID NO: 244284 - RNA, 65 nt, Homo sapiens
gggcacaccggagaacacacacaagagaagaaacaaaaccaagcacaaaaacaaccaaaccagca

SEQ ID NO: 244285 - RNA, 74 nt, Homo sapiens
cccggcaggccgggacaaagaagcagaccgaaacaccgcccggcggagaaaagggacagggaagaagggaagag

SEQ ID NO: 244286 - RNA, 103 nt, Homo sapiens
cgacaaggacggacgcagaagaggcgagaaggaggccgggaaccgagaggaggccccacggagccacgaaacagcgaggagccaccaaaccaggccaccgggc

SEQ ID NO: 244287 - RNA, 113 nt, Homo sapiens
accaccccaacaacacagcacccaaaccaaacaggcgcagccaagccagcaagaggaaaaccaggaccgaagccagaacacccgcgcgcagggaaaaaaaaaagacaagggag

SEQ ID NO: 244288 - RNA, 85 nt, Homo sapiens
gggccagggaaaggagcagagagagagagcagaaggagaaaacgggaaacggaaaaagagcgcagaggaaggccagcaaggccag

SEQ ID NO: 244289 - RNA, 82 nt, Homo sapiens
cgacgccccgccgccgccgaggaggcgagcagccgggagacaccgccaccgccaggagcgaaggggggacacgcggaaaggc

SEQ ID NO: 244290 - RNA, 88 nt, Homo sapiens
ggcggagggaagagaccacaaagccaggcagaagcagacaggaggacgggagcggcggagcgagggcggcccccacggccaggcgggg

SEQ ID NO: 244291 - RNA, 79 nt, Homo sapiens
ccaaaaccagggcggcaaaacgagcgggccaggcccgcgcccgggggccgccgcccggccgcccgcccggacccccccg

SEQ ID NO: 244292 - RNA, 89 nt, Homo sapiens
caccagccgcccaagccgcacagccgcggcggcagcagcaggagagagcccgcaggaagcacacccaggcggcagacaggagcagcagc

SEQ ID NO: 244293 - RNA, 60 nt, Homo sapiens
gcgcaccgcgccgcaggcacccggacaagcgcaaaccagccggcgggcgccacaacggac

SEQ ID NO: 244294 - RNA, 83 nt, Homo sapiens
ccaacaccagggaagagacacacccaggccccagggaaaggaccgaggcaggaaagaggccagacgcagggaccggcaccgac

SEQ ID NO: 244295 - RNA, 69 nt, Homo sapiens
gaaagaacagacaagccgcaagaaccggggaagggagagggcccagggcagcgccacagacccacaccg

SEQ ID NO: 244296 - RNA, 69 nt, Homo sapiens
ccaaggcgaagacacagcaacccaaaacacagggacgcaaaagaaagcccagaggcagcacagaaacgg

SEQ ID NO: 244297 - RNA, 55 nt, Homo sapiens
ccagaggcagccagcagggggaggcgggagcggaaaggaaggggaggcaccacgg

SEQ ID NO: 244298 - RNA, 71 nt, Homo sapiens
gagggcgaggccgcgagcccccgccgcgccccacgccggcacacacacagaggaaggggaggagcacagaa

SEQ ID NO: 244299 - RNA, 73 nt, Homo sapiens
aaacacgaccgaccgccaccgacgccaggaaaggagaagcagggcccaacaagagagggaagcaggaaaagag

SEQ ID NO: 244300 - RNA, 76 nt, Homo sapiens
aggagggcgccgagcaacaaccgccgagcggaacaagcagaaagcacgaacaacgagaacaagacacgagcaaacc

SEQ ID NO: 244301 - RNA, 85 nt, Homo sapiens
gaagaccacacccggagccggaccccggagcaggcagccccgccccccccgacgggcaccacagcccgccgacacagccaccaag

SEQ ID NO: 244302 - RNA, 86 nt, Homo sapiens
ccgagcaagaggcaaccccggcggcggcaacccccgggacgggccaaaaggaagcccacgacaagagaccaggcaagaggggagaa

SEQ ID NO: 244303 - RNA, 85 nt, Homo sapiens
agccccgcggaccagaccaggccgcggcccgggggacccgacgaccagggggagagacccgcgcccccccgagcccagggcacgg

SEQ ID NO: 244304 - RNA, 113 nt, Homo sapiens
cggggccggggcgcgggccgcaggcgggggccacgcgcagggcccacagagcaggcccgggcgaaccgccgcgccaggccagcggggggggaaagcccaaccgggcccccggg

SEQ ID NO: 244305 - RNA, 78 nt, Homo sapiens
ggaacgacaaaccccaggcgggccaaggaaggccggagaagccaaacggaggaaaaggacgccgaaaagggagagcac

SEQ ID NO: 244306 - RNA, 74 nt, Homo sapiens
ggaacggggccccgcaaggccggcgcggaggaggggagcagcgcgcaaggacggaaaaaggacaaggaggaaag

SEQ ID NO: 244307 - RNA, 60 nt, Homo sapiens
aaacccacggaacgcccaccacgggacacggaggaaccggccgaaccagaccggagcagg

SEQ ID NO: 244308 - RNA, 67 nt, Homo sapiens
aaaccggcaagaaaaccagcaggacaaaaggcaagggcggaaagggaacaaagagcagaagacccca

SEQ ID NO: 244309 - RNA, 87 nt, Homo sapiens
cggaacaggacgccccgaggcggcacccaccccccgagcccgcccgccggccccagcccccaccagcagccccgggccacaggcagg

SEQ ID NO: 244310 - RNA, 84 nt, Homo sapiens
gcggcggagccgaacaagaccgaaaccagaccaagaggccgcgcagccaaccaacaagggcggaaaacaccccaaaagccaaaa

SEQ ID NO: 244311 - RNA, 79 nt, Homo sapiens
cgcgaggggccccgcccaacggagcaccggaggcagagggccaagagggcgccgagccaacaggagcagcgcaggccga

SEQ ID NO: 244312 - RNA, 88 nt, Homo sapiens
ggcgcagagggggcggcgaccgagaggcgcggagccggggacgccaaggccagcagagcccaagggcgccagccaccacccagacgac

SEQ ID NO: 244313 - RNA, 82 nt, Homo sapiens
gcggccagagcgccggcaagagccgggcggagaaccggggccggaacaagacccccgaaaggaaccgggaagcaaaggggag

SEQ ID NO: 244314 - RNA, 88 nt, Homo sapiens
gaccgcacgaaacgcccgaaaacagggccggccgcagagcccaccggaaggagaaggaagaggagcggggagccacgcgccgacaagg

SEQ ID NO: 244315 - RNA, 56 nt, Homo sapiens
cggccaccgccggcgggcaacagggaagcagagccccgggccgggaaggggaaacg

SEQ ID NO: 244316 - RNA, 79 nt, Homo sapiens
gcagaggagacaaaccggagaaggagccaagaaagagaaggaaccccagaaacacaaagaagaaagcagcaagacagca

SEQ ID NO: 244317 - RNA, 85 nt, Homo sapiens
gcagccagcccgggccacggggcaggcaagggaagggcaagcccaagcccaagccggagccgagcgagccagagaagagacaagc

SEQ ID NO: 244318 - RNA, 67 nt, Homo sapiens
aaagagggacagccgcacggaggcgaaacacaaaggggcgacacaccccaccgaaccagcagccccc

SEQ ID NO: 244319 - RNA, 74 nt, Homo sapiens
ccccgcgccgccgaccccccggcgccgcgccggcggcgacaagccgagaccaccaggagcagagcggaggcaac

SEQ ID NO: 244320 - RNA, 83 nt, Homo sapiens
ccgggcagcgagacgaaaaacagccaaagcagggagggaaaagaaccagaaaggaggcagggaccaaggagggaacccaggaa

SEQ ID NO: 244321 - RNA, 55 nt, Homo sapiens
aggcaccaggccaccacagaaacaaaagcaacaaagagggagaagcagagaaccc

SEQ ID NO: 244322 - RNA, 85 nt, Homo sapiens
ccgccgccgagaggaggccagagaacaggcagcgcgcagcacgaggcccgcgggccccgagcgccacccagccccggggaccgga

SEQ ID NO: 244323 - RNA, 43 nt, Homo sapiens
aaccaggagacagagcccaaagggcccacaagggaggcgcgga

SEQ ID NO: 244324 - RNA, 75 nt, Homo sapiens
ggaccacacagccagaacagggacgccagccgcagaggaagacccgaagaggagaaaccggcaaagagaagcaac

SEQ ID NO: 244325 - RNA, 79 nt, Homo sapiens
cccacgaaccaaaagggacggacaaaggaacaggaccaggaacaaaaggagcagaaaaccagcagaaaggaaaaggaag

SEQ ID NO: 244326 - RNA, 84 nt, Homo sapiens
gcagccggagcccgggaggggccgcgccgccaccgcgaacaggagcccgacagaagagagcccgagggaaaagacaggcaacag

SEQ ID NO: 244327 - RNA, 84 nt, Homo sapiens
gagaacagaaggcaaaagagggaggagagcgaccgaagcagaaagccgggagaagaggcacaaggacaggcacagagaacagaa

SEQ ID NO: 244328 - RNA, 79 nt, Homo sapiens
gcacgagcaacaacggagaaaagaagacgacacaggcaggccaagacaaggccgagaccgcgggaagaagaaggaggag

SEQ ID NO: 244329 - RNA, 85 nt, Homo sapiens
agcgcaccggcggaacggacccccgccgccggccgccgccacagccggacccgccacccggggccacaacacggacaccagccga

SEQ ID NO: 244330 - RNA, 76 nt, Homo sapiens
aagccggcggaccgcgccgcgccggagcagggaaaccggcccgcaacgaggaaggacgaaacccacaccaacggac

SEQ ID NO: 244331 - RNA, 85 nt, Homo sapiens
gagaaggcgaggccacagaaccagccacagcggggcggagagaaaaacaaccaccagcgagcaaaaaggcaaagaccaagaccac

SEQ ID NO: 244332 - RNA, 56 nt, Homo sapiens
ccccggccagcaacagcgagaccggagagaacagaaaaaaagcggcccgggaccag

SEQ ID NO: 244333 - RNA, 89 nt, Homo sapiens
agagaaaacagcgaaaacaagcgcaacgaaccccgagcgaacaggaggacagggaaaaagaagggaacggagagacaaaacccacgaag

SEQ ID NO: 244334 - RNA, 79 nt, Homo sapiens
ggaagacaacaccagggggaggccagggggagagggccaagccggaagaagccagccaggagaagaaacagaggacggc

SEQ ID NO: 244335 - RNA, 73 nt, Homo sapiens
ggggccgcgccccaaggcggcgcgaagccacaagaaaggagcgggggaggccccacaccgacgccaggccaag

SEQ ID NO: 244336 - RNA, 90 nt, Homo sapiens
aaaaccagcagagacaaggcacggagagcaacaaagccgacccaacccaagggccaaaggaggcagccaccagcaggaggaaaaccaacg

SEQ ID NO: 244337 - RNA, 76 nt, Homo sapiens
ccaaaagacagcccagacaggacccaggaagccacccgcagaggggcaaggagaaagggcaaacgcagcacacaag

SEQ ID NO: 244338 - RNA, 78 nt, Homo sapiens
ggcgagggaaaagcgaggcaaggcaggcggaagcgcgcaagacgcaacacaaacgagaaagacagcccgaacggagaa

SEQ ID NO: 244339 - RNA, 67 nt, Homo sapiens
gaacaggggcaccgccgagggcacaccgcgaaagagaagaaaaacagagcccgacgaaacagacaaa

SEQ ID NO: 244340 - RNA, 32 nt, Homo sapiens
ccaaacaggagaaaaaggaccaccagacagac

SEQ ID NO: 244341 - RNA, 73 nt, Homo sapiens
gggaaagaaggcaaaacacgggcccaaagcccagccaaggacccgaaaaacgagccacaccaaaagggaagaa

SEQ ID NO: 244342 - RNA, 36 nt, Homo sapiens
aacccaccccaaagaccagcaaagggaaagaaaccc

SEQ ID NO: 244343 - RNA, 80 nt, Homo sapiens
cagccaggccgacacccaaccgggcaggcgagacgcagagggcagaggaaagggcgcaggcagaggagcagccgccaccc

SEQ ID NO: 244344 - RNA, 68 nt, Homo sapiens
cccccaagcgccaacggaggagccagccgggagcagcaagacacgcagcagcaggggaacaaaggccg

SEQ ID NO: 244345 - RNA, 79 nt, Homo sapiens
aggcacgaagaaaagagaaggaaaaacagaacggcaaaccggaaaaaaacgggccggaaggggggcgacgcggaaggca

SEQ ID NO: 244346 - RNA, 66 nt, Homo sapiens
ccgaaaaagggaaccacaaacccaaggacaggcgaagaaacagagaccacagagcgggaaaaggga

SEQ ID NO: 244347 - RNA, 82 nt, Homo sapiens
cgccccccgacgccccgccgccgccgaggaggcgagcagccgggagacaccgccaccgccagcccagcagccacagcaaccg

SEQ ID NO: 244348 - RNA, 79 nt, Homo sapiens
gagcccacccaacccagccaaaaaggaaacaagcaacaacaaaacagggcggagaacggaaaagcaccaggaagcagag

SEQ ID NO: 244349 - RNA, 82 nt, Homo sapiens
aaaaaggagacacggaacggagcagcccgaagacggacgcgaaaaggggcgacagacagcgcaagggcagagcagaaggagc

SEQ ID NO: 244350 - RNA, 62 nt, Homo sapiens
gaacagcagcaaagacagaagaacagcaagaaggaccggaagagcaagcagcagaccaaaaa

SEQ ID NO: 244351 - RNA, 80 nt, Homo sapiens
ccagcagggcaagggcacacgaggggccccggcgccgggagagggccacgggagaaacggcggcaaacaaagagagaggg

SEQ ID NO: 244352 - RNA, 71 nt, Homo sapiens
agggccaaagaagggagagagagagaagaggaaagacccaaaaaagcgaggaagagcgacagcaaggagga

SEQ ID NO: 244353 - RNA, 77 nt, Homo sapiens
gaaggaacgaggcaaggagcaaagcagcggcgcagcccgggcaacggggcggcacacaaggagcgaagggcagggag

SEQ ID NO: 244354 - RNA, 70 nt, Homo sapiens
caggcccgggccaaacccccccgaacagaaaaaaggagcagccgaggccaggaggggcggaagacccggg

SEQ ID NO: 244355 - RNA, 74 nt, Homo sapiens
acccgggccaagggcccaccagccccaagagcgggacacagacaggccaccagccagcggaccaccagaaagac

SEQ ID NO: 244356 - RNA, 69 nt, Homo sapiens
cacgcaggaaaacagagaaccaagcggcaaagcaccgaacgaaggggccacaggcaccaggaagaaaaa

SEQ ID NO: 244357 - RNA, 67 nt, Homo sapiens
gagggaacccacccccacccacaccgccggccaggaggagagcgcaccaccaaaaaggcaaacacac

SEQ ID NO: 244358 - RNA, 38 nt, Homo sapiens
ggcaagaaagcaagagaaggcccaggcccgggacggag

SEQ ID NO: 244359 - RNA, 83 nt, Homo sapiens
cacagcagcaaaggggacagagacgaacgggaaaaggggccaaacaggagaagaagaagaagaagacaggcgggcaagcggcg

SEQ ID NO: 244360 - RNA, 72 nt, Homo sapiens
caaaaacacagggaaccgggcaaaggagggcccaaaaaaggcccggacacaaagaaacaagaccggagagaa

SEQ ID NO: 244361 - RNA, 82 nt, Homo sapiens
agaagggacgccaccgccccacacggcggagaagcagcggggggccacgcgacaaggccaagcagaagaaccagcacaggcg

SEQ ID NO: 244362 - RNA, 74 nt, Homo sapiens
ggacccaccgacccgcgagcgcccaggacccgccaccaaaccgcccgagggaccagggggccaaagggcgaggg

SEQ ID NO: 244363 - RNA, 116 nt, Homo sapiens
cgcacccgcgccagcaccacgcccgcgccgcgccgccgccaccagcccaagagaaaggagacgagagggccccaaagggaccagggacgcgcccgcgcgggagacgggagccagcg

SEQ ID NO: 244364 - RNA, 78 nt, Homo sapiens
ccggacgcgccacgcaggccaggagaagacaaaagagaaggacagcgccaacaagaagggacaagcggaggcgccggg

SEQ ID NO: 244365 - RNA, 75 nt, Homo sapiens
gccgcccgggccagcggccgcgcacccccggccggaggcaccagcggcccagaggcggggaccgagcggaggcgg

SEQ ID NO: 244366 - RNA, 79 nt, Homo sapiens
acgcagccgccccgaaggagccagacaacccagaaaagaaaaggccaggggcgccgaaaaacccgggaacaaacagggg

SEQ ID NO: 244367 - RNA, 66 nt, Homo sapiens
acccgcgaagcgggaagggacgaccacgaaaaaagagggaccaaaacgcacgaggaaggaaccaag

SEQ ID NO: 244368 - RNA, 86 nt, Homo sapiens
gaagggcaggaggaagaaaggagaaaacagagaccacagagaccacagacaaagcagagagagcccacgaacggcgggaacagaaa

SEQ ID NO: 244369 - RNA, 76 nt, Homo sapiens
cgccgcggagggagaggcgcagagcgagggcaggaggacccaggagacaagagaaaaacgagagcgcaaaggcaag

SEQ ID NO: 244370 - RNA, 60 nt, Homo sapiens
cgaggcccaagacgcagggaagggcacaagagaagcaaggccacagccgggcccgggcag

SEQ ID NO: 244371 - RNA, 58 nt, Homo sapiens
agcagccacggcgggcggcccgacgccccgaagacacgaacgcgggaggagaccaaac

SEQ ID NO: 244372 - RNA, 87 nt, Homo sapiens
agaaggccggagacaccagcagcgcccgggggcggagaaggccaggcagcagcgcaggaggagcccggcaggcagcggccagcggga

SEQ ID NO: 244373 - RNA, 72 nt, Homo sapiens
aaaacagaaccacacaaacgggaagaaagacccggggaggagacacaggaccaggccccccgcagaaaccgg

SEQ ID NO: 244374 - RNA, 48 nt, Homo sapiens
agaggcaggccaaagagagagagggacggaccccgggcccccccggcc

SEQ ID NO: 244375 - RNA, 75 nt, Homo sapiens
accgaggaggaggcagagccccgccccccgcgggagggagagaggacagagccagaggaccccggacaaacacag

SEQ ID NO: 244376 - RNA, 63 nt, Homo sapiens
ccgagaaaaccagaaagcagaagccccagaggagcccgaaacccccaggcgggcaggaaggag

SEQ ID NO: 244377 - RNA, 63 nt, Homo sapiens
gaacgcacgcccaggacaacgccgaaggaaaagcacgcccaggccaaagcaccggccagcgac

SEQ ID NO: 244378 - RNA, 74 nt, Homo sapiens
ggagcgacggggaggcgcggccaacggggccacaagggaacccagaaccgcggaccacagcaaaccaagcagac

SEQ ID NO: 244379 - RNA, 68 nt, Homo sapiens
ggccccacccgagcggccccaagaaaaacaaccaccagcgagcaaaaaggcaaagaccaagaccacca

SEQ ID NO: 244380 - RNA, 72 nt, Homo sapiens
aaggaaggagaaaaggggccccagaaaggggacagaaggacagaagaacgacaaaaaagggagacgcgcgga

SEQ ID NO: 244381 - RNA, 76 nt, Homo sapiens
gcagaccaaggacacccaagagggcgagcaggacgaagcgcccgccaccaagccgcagcgcagagaaggagcacac

SEQ ID NO: 244382 - RNA, 80 nt, Homo sapiens
acagcggcaggcgcaggagcgggacagcaggagagcgcaaagccggcggcaagagacgggccgagacccaaggccaaggg

SEQ ID NO: 244383 - RNA, 67 nt, Homo sapiens
gcagggcgcacgcgcgcgccccacccggccaagcacacacaccaccggcgggaggcacaggaggaag

SEQ ID NO: 244384 - RNA, 85 nt, Homo sapiens
gcgcagcaacccggggagacgcgaagcgaacccgcgcaggagaacgcaacgcggaggcgaccgaagaccgcagaaggaagacaga

SEQ ID NO: 244385 - RNA, 61 nt, Homo sapiens
ccccaccagcaggaggggagagccaagcgcaagaggaaggggaggagggccaagagccacg

SEQ ID NO: 244386 - RNA, 71 nt, Homo sapiens
gaagcccagggaagaaggcgaggcaccggaacagacgcaggaaggcaaggcaaggaggaccaagcgaaaaa

SEQ ID NO: 244387 - RNA, 97 nt, Homo sapiens
agaagaaaaagagcaaagaaagaagagaaaaagagaagagaagaaacccagcgaagggcagaaaaaaccagcaggccaggaacacaacccaccgaca

SEQ ID NO: 244388 - RNA, 71 nt, Homo sapiens
agaagagcaaagcagccagacaacaccagaacagggggagaaccaggacaggggaagaaacgagcgagccc

SEQ ID NO: 244389 - RNA, 75 nt, Homo sapiens
cgccgagcgcacagagcaggcgacccggaggaagaagccgcgcaccaacaccagccaggaagcccaaaggagcca

SEQ ID NO: 244390 - RNA, 90 nt, Homo sapiens
cagacgaaggacagcggcaccgccagacggccagaaagccgccagagcggggcacggagcgggaaaaacaaccaccagcgagcaaaaagg

SEQ ID NO: 244391 - RNA, 69 nt, Homo sapiens
gcagcaaaacaggcagccgagaaaagggcagcagacgcgcgcgcgaagaaagccaggcagagaccaccg

SEQ ID NO: 244392 - RNA, 81 nt, Homo sapiens
gccgaccaggaggcaagagaagcgggaacaaaccaaaggcaggggcgacagggacacaacccgccacgcggagcacgccaa

SEQ ID NO: 244393 - RNA, 86 nt, Homo sapiens
cagcaaaccaccagcagcaccagcaacagggcaagagaccagggaagcagcaccacggggagacaagcaaggcccaaagcacaagc

SEQ ID NO: 244394 - RNA, 80 nt, Homo sapiens
cggcccgcggcgcgcaccgggcgcggacgcccccggaagcgcccccccaggcaagaagcaagcaaccaggcgccgcacca

SEQ ID NO: 244395 - RNA, 58 nt, Homo sapiens
gccccagccgccggccccccgaaagcgcacccacaaaccaaaaaacgggacaggccac

SEQ ID NO: 244396 - RNA, 82 nt, Homo sapiens
gagcgagcgagggggggcgcgccggaaaccggagcgcgcagcagagacaccaggcgccgagaaggccagcagagaaacaggc

SEQ ID NO: 244397 - RNA, 79 nt, Homo sapiens
gcgccgccccgcgagcacagagcccgccgccgaccgccgcccgccacacccgccgccagaaaaccagaaggcaccgaca

SEQ ID NO: 244398 - RNA, 74 nt, Homo sapiens
gacgcaaggagcagagggcgccaccgcagacgaggggaaaagagacgcaaaccacgaggacagagaagagagaa

SEQ ID NO: 244399 - RNA, 59 nt, Homo sapiens
ccgccagacgggggagagacgcaggaagcgcagaaaggaagagaagaagaagcagaaag

SEQ ID NO: 244400 - RNA, 71 nt, Homo sapiens
cagcgggcaaaggacacccacagggcggaacagaacacaggaagagggcgagcaaagaagaagacacggcc

SEQ ID NO: 244401 - RNA, 75 nt, Homo sapiens
accacgaggccaccggaagcggcagacggccagacaggcacagcagcccaggggagagcagccgcagaaaccagc

SEQ ID NO: 244402 - RNA, 84 nt, Homo sapiens
agcggcccacagcaggacggaagcgagggcacgggcggcagcccgagaccgcagcaggaacccacccacagagaagaaaagagc

SEQ ID NO: 244403 - RNA, 69 nt, Homo sapiens
gaaacggaaccagaagcagagccaacagaccgaacaaaggaaacaacagcacagaaagcacagaagcgg

SEQ ID NO: 244404 - RNA, 40 nt, Homo sapiens
cacggggaccacaggacaaagcgcgcgggacacgccgggc

SEQ ID NO: 244405 - RNA, 72 nt, Homo sapiens
cacaaacgaagaaaaaaggaggaaggaacaagccgggaaagcaaggggacccccaaaagacaagggcaaaac

SEQ ID NO: 244406 - RNA, 54 nt, Homo sapiens
ggaccgagagcgcgaaacgcacgagaaggaaggcaaagggcaacagaggcagcg

SEQ ID NO: 244407 - RNA, 88 nt, Homo sapiens
gagcagagcggccggaagcgcggagggagccgcgggaggaccgcaggaagggccgggccggggcacgggcccacggccccccaccggg

SEQ ID NO: 244408 - RNA, 76 nt, Homo sapiens
aacaaagcccggaaggcaaggcagggagaccagacggggaggggcccagcaggcgcgagaagaagcagaagaaacg

SEQ ID NO: 244409 - RNA, 67 nt, Homo sapiens
aagaacagaacagcgaaacaagaggacgccgccagccaccggcgcgaagccagaccagaccagcagg

SEQ ID NO: 244410 - RNA, 70 nt, Homo sapiens
aagaacagaaagcgagcagagcccgcgaacaagacaagggaaagacaaggagccgggccgagaaaccgaa

SEQ ID NO: 244411 - RNA, 59 nt, Homo sapiens
aagaacccggcccagagccaaaggagccccacaaaagaaagaaccaagagggagacaag

SEQ ID NO: 244412 - RNA, 66 nt, Homo sapiens
ggcgcgcgggggaggccggggcagccgaaagaggcacgccaggaagacacagaaaagaaccccgac

SEQ ID NO: 244413 - RNA, 96 nt, Homo sapiens
caacacgcgagcacacacaacgcgagcacacccccagaagacccagaagaagaagggcaagaagacacagaagcacaaacagcaaaaaccgcggca

SEQ ID NO: 244414 - RNA, 75 nt, Homo sapiens
gacggccaccggcgggaggaacaaaaggacccagacagacggcacgcccacagaggagcgggcgaacgcagcacc

SEQ ID NO: 244415 - RNA, 96 nt, Homo sapiens
gcaggcggagaaggagacaccggaggacgaagagggggaggaaacccagcggcggcagaaccagccggcacaaagccgaaccagagagagcaacgc

SEQ ID NO: 244416 - RNA, 80 nt, Homo sapiens
ccagccgggcggggcccggcggagcccggacgggcgccacaccaacaccacggaaccaccccccgggaagacacaaacgc

SEQ ID NO: 244417 - RNA, 81 nt, Homo sapiens
aagaggcaccgcacggcgcgacagcgacccccacagagccgcagaaagagacagccaagcagccgggcccgacccccaccc

SEQ ID NO: 244418 - RNA, 70 nt, Homo sapiens
ccagaaacccaccacagccaccgcacccaacaccgaagaaaaccccaggcggacgagccgaaaaagacca

SEQ ID NO: 244419 - RNA, 85 nt, Homo sapiens
caacaagaacagacagaaggcaaggaaagggagaacacacgaaggaagcagaagaggggcacaagcacgcaggagaagaggggag

SEQ ID NO: 244420 - RNA, 72 nt, Homo sapiens
caggaccccagagcgacagcccgggacaccaagaaagaacagagagagggcgcaaaaacccagaaccacagc

SEQ ID NO: 244421 - RNA, 69 nt, Homo sapiens
ccgacccaaagggaaaacagaaacagagggaggaaccgaaaggaaaccgaggacacagaaaagggcaca

SEQ ID NO: 244422 - RNA, 74 nt, Homo sapiens
agacccaccccaggcccccccgcccacccgcaccgcaggacacccaacaccgggcaacaggccgcaggaagcac

SEQ ID NO: 244423 - RNA, 75 nt, Homo sapiens
agagggggcgcacaacaaccacggcggaaccagagcccaaaaccggaacacgacagccaaaggagacacagaagg

SEQ ID NO: 244424 - RNA, 53 nt, Homo sapiens
ccgagcacaggggagaggacggagacaagcagagaacccaccagacaacaagc

SEQ ID NO: 244425 - RNA, 82 nt, Homo sapiens
agacgccgccaccgccagggcccgagacagacgagggagaagacacacaagggggcggccacgaggcacaacacccggggaa

SEQ ID NO: 244426 - RNA, 72 nt, Homo sapiens
ccccccacgggcagccggaaggaggaccacaggccagagcagcgaaagcagcaaccaccaaccccgacaccc

SEQ ID NO: 244427 - RNA, 66 nt, Homo sapiens
gaacggagagggaaccacccgacacacagccaggcccacgggaaaagggggaaaggccaagaacgc

SEQ ID NO: 244428 - RNA, 42 nt, Homo sapiens
caggacagggcacagacaggaaggacagcagagccggcgccc

SEQ ID NO: 244429 - RNA, 64 nt, Homo sapiens
ggaggcggggacagacagcacccaccggggccaaacccagacgcaaccacccccagagggaaca

SEQ ID NO: 244430 - RNA, 86 nt, Homo sapiens
ccggagcgcgaaggccgggacccggccccggcccacaggggggggcaaacccgagagaacgggcccaaaaacccagaacagaagac

SEQ ID NO: 244431 - RNA, 83 nt, Homo sapiens
acacggaccgagccgcgaggacacgggcgcaaccgcagcacacagcgaccgggagaacaagacggaaacccaccagagaaggc

SEQ ID NO: 244432 - RNA, 40 nt, Homo sapiens
cagaagacaggaagcaagcgaggagaccggaaaccgagag

SEQ ID NO: 244433 - RNA, 47 nt, Homo sapiens
ccggacgccagcggacacgcgggcgaggagacccgaaagaccaccgg

SEQ ID NO: 244434 - RNA, 71 nt, Homo sapiens
cggggggcacgggcgaccgcggcccgccgacccccaggggcggccccggcgaggcaggaggacagggccag

SEQ ID NO: 244435 - RNA, 71 nt, Homo sapiens
ggggaccaccccaggaagaagacaacaggacccaacagccaagaaaaagaaagaaagggaagaggaagagc

SEQ ID NO: 244436 - RNA, 56 nt, Homo sapiens
gccaggaccacgggaacgcaccaaaccaaccggcaacagagccaagcccacaacac

SEQ ID NO: 244437 - RNA, 51 nt, Homo sapiens
cggagcgggggcccgagaagccgacgggaccgaaaaaccgcagccaccgcc

SEQ ID NO: 244438 - RNA, 77 nt, Homo sapiens
aaccacacaaacaacaacccaagagaagacaagaaggagcgccacgcccagggcccgaggcgcagaccccgagagca

SEQ ID NO: 244439 - RNA, 83 nt, Homo sapiens
gcccgagagcggcggcccggccccggcgcagcccggaaagccggcaagacgagaaagcagaacagcagagaacacaacacagg

SEQ ID NO: 244440 - RNA, 79 nt, Homo sapiens
gacccgcgggcccaagcacaccggagcaacaaccggcgggccgaggccgcaggaggagggagagcccaaaaggcagagc

SEQ ID NO: 244441 - RNA, 84 nt, Homo sapiens
gcggagcgggagcggccggaggagccaggacgcagcccggcggacgccggcacagaacgccggcaagaagccaacggagaacca

SEQ ID NO: 244442 - RNA, 78 nt, Homo sapiens
aggaggaaccccccgaggcaaagcagaggcagaaccagggggagcgcggccccaggagacgacgggagcgagcgggag

SEQ ID NO: 244443 - RNA, 75 nt, Homo sapiens
ggacgcaggcgcgaagcccgagacaggagggggaccagggagggacgcaagcaaaggggacacgcgcccaccagg

SEQ ID NO: 244444 - RNA, 58 nt, Homo sapiens
ggggcggcgaggcgcgaggagcagggaaaaacccgcagaaaacagggcacgagaccag

SEQ ID NO: 244445 - RNA, 75 nt, Homo sapiens
cgacaaggcaaagaaccgaagacgacccaaaagggaccagggcccgaagacaccccgccaaaaggacagaggacc

SEQ ID NO: 244446 - RNA, 72 nt, Homo sapiens
gccagccgcgacacgaacagagggaggagacagaggagccaaaaccgcaggcagaagagaaaagaagcgaac

SEQ ID NO: 244447 - RNA, 68 nt, Homo sapiens
ccgcgagaagaggaaaggggcaaccaagaggagcgagccgagagaaggcaagcaaaaacagcaagagg

SEQ ID NO: 244448 - RNA, 76 nt, Homo sapiens
gaaaagaagaaccacccaccagagaccaagccacagaacggcaaagaaggacacacggacccgaacaaagacaaag

SEQ ID NO: 244449 - RNA, 85 nt, Homo sapiens
gcaggccggcgccggaggaagagcagagggggaccagagagcccaacgccgggccaagaccccgagggaacaaggcaaaagccga

SEQ ID NO: 244450 - RNA, 69 nt, Homo sapiens
ggaacccgggccaaaccacccccacccagccccagcagcagaaagcaccccagcgaggcccagcaaaag

SEQ ID NO: 244451 - RNA, 49 nt, Homo sapiens
ggccgaccagagaacaggaacccggcaccagccgggcaaaaacccaaac

SEQ ID NO: 244452 - RNA, 47 nt, Homo sapiens
gggggcggcggcggccagcgccagaagggccagcgggccagcgagac

SEQ ID NO: 244453 - RNA, 71 nt, Homo sapiens
gggaagcacacaagggccgaagcagggcacaaaaccaaggccaagcaaggagagcgaaccaggggagcgga

SEQ ID NO: 244454 - RNA, 54 nt, Homo sapiens
aaacagcccacagagaccaacaaggagagagagagaggaggcagggaggaggcg

SEQ ID NO: 244455 - RNA, 74 nt, Homo sapiens
cggggccggggaacacacaggagcggcagcccacaagcaggaagaccagccccaggagggaaacagagcaccca

SEQ ID NO: 244456 - RNA, 73 nt, Homo sapiens
ggagagcggggggaccccgcgcgccggcaagcacgcccgaggcgaagccgacgagcccgaacagacgcaccag

SEQ ID NO: 244457 - RNA, 68 nt, Homo sapiens
gccacagcgggaaaagaaagcaacgcgagcccgcacagcagcagacgacaggacggcagagccccaag

SEQ ID NO: 244458 - RNA, 80 nt, Homo sapiens
ggaaaagaacgcacaaaacgagagcccacagaagcccagcaacgggccgaccaagcagaacccgagaagagccgagaaac

SEQ ID NO: 244459 - RNA, 69 nt, Homo sapiens
ggaagaaacccccagccgacgcccgcgccccccagcaagacacggccgccccgaagcgcagcaagccgg

SEQ ID NO: 244460 - RNA, 95 nt, Homo sapiens
cgggcgggacgggggggcggcccggccccgcaggggcaaaagcagcgagagcaagcagaacggaacgcgaggaagaaagcaaaggaccacacaca

SEQ ID NO: 244461 - RNA, 76 nt, Homo sapiens
cccgggggcggcggccacgccaaggacggggagaaccgcaggacagacaacacagaggaaggaccagaggccaaca

SEQ ID NO: 244462 - RNA, 71 nt, Homo sapiens
ggggagagggacggggaaggccggggcgcccggcgccggccgagaaggcagaggcggccgccgaagacccc

SEQ ID NO: 244463 - RNA, 79 nt, Homo sapiens
ggccccagcgcccggaggcccgaggaagggagcgggccccggggcggcggccgcgggcggagcgcgcggccgcaggagc

SEQ ID NO: 244464 - RNA, 62 nt, Homo sapiens
aacaacacgaaggaagagcccaggcggcagaagacaggccagaagcgcagccagggcagcgg

SEQ ID NO: 244465 - RNA, 38 nt, Homo sapiens
cagcggagcagaggcacggcagcgggacacggaagagg

SEQ ID NO: 244466 - RNA, 60 nt, Homo sapiens
gcccaagaacgaggcccagacgccgacaaagcaaggcccaccgaaacacgaacggacccc

SEQ ID NO: 244467 - RNA, 60 nt, Homo sapiens
ggcaaagagaccccagaaccgggcagcgaagccggccagcgcagaaccgcagcccagccg

SEQ ID NO: 244468 - RNA, 76 nt, Homo sapiens
ccgcggcccgagggacggccagccgcgcgggcggcggccggggcagcgccgcgagccagcaacgggggaaggccac

SEQ ID NO: 244469 - RNA, 68 nt, Homo sapiens
gaaggacggggagcccagaagcgccaccgaaccaagaaaccgcccccaaagccagagcccaagccaaa

SEQ ID NO: 244470 - RNA, 70 nt, Homo sapiens
agaaaccaaggagacacccccgagcaccagagaccagggacgaaagggggaaaacgaccgggaaggagga

SEQ ID NO: 244471 - RNA, 57 nt, Homo sapiens
accgggcgacacgccaccacacacggaagccagcaacccaaggagacggcgcggggg

SEQ ID NO: 244472 - RNA, 79 nt, Homo sapiens
ggcaaggaaacggcaaaacaggagacggaggcaccacccgaacccacggcccccggcacagagaagcgaagaaaaagaa

SEQ ID NO: 244473 - RNA, 54 nt, Homo sapiens
cgcgggagagaggacccccccccccccccaaggagaaaagccccgcaaccgacg

SEQ ID NO: 244474 - RNA, 79 nt, Homo sapiens
gaaaggaccaagaacacagccacaagaggacccagcgagaaagccacccacagacccacgcccccacccagaacaaaca

SEQ ID NO: 244475 - RNA, 71 nt, Homo sapiens
gcagaccagccagcggcggcccaggagaaccgcgagacaacaaaagcccaggccccccgagcgcacgcacg

SEQ ID NO: 244476 - RNA, 66 nt, Homo sapiens
caggcggcgcggacggggcggaggcagagcaacagggacacaagcaagaagaaagggaccgacagc

SEQ ID NO: 244477 - RNA, 78 nt, Homo sapiens
agagcagaagcgcacacaaacaaaaacacaggaagcaaaagaagaggaccacacacagacgggacgaagaaaacaaag

SEQ ID NO: 244478 - RNA, 75 nt, Homo sapiens
cagacccaaaggcaacaacagcagcaagaccagagcaaaaagacaaaacagacgccaaagaacaagacgggagag

SEQ ID NO: 244479 - RNA, 62 nt, Homo sapiens
aaagaagccaaagggacacggcaagacaagacccgacccgggagcgcgccggcagagaccgg

SEQ ID NO: 244480 - RNA, 84 nt, Homo sapiens
agggcggggaggagccgccgcgcccagcccgaggccaacggaccacaccaaaagccaccaaaggaacacgccaggaaaccagag

SEQ ID NO: 244481 - RNA, 89 nt, Homo sapiens
cgagccagcgcgccgcgccggccccaccccggcccgaccccgacccggcccggcaggccccaaccagaacagaggcccccgaaaaagcc

SEQ ID NO: 244482 - RNA, 73 nt, Homo sapiens
gagagaggcaggcggagccgaccgggccaggccgccgacccccggcaaagcaccagaggaagaggaggaacga

SEQ ID NO: 244483 - RNA, 83 nt, Homo sapiens
cagcgcacggcagcggcaccacggcgacgcacaaggccaaacacacaggaacgccagaccccagccgagggaggcaacagcaa

SEQ ID NO: 244484 - RNA, 65 nt, Homo sapiens
agccagaaaggggggccgacaggcgcccacacccaagcaggccgcaagaaggacagcccaggaaa

SEQ ID NO: 244485 - RNA, 81 nt, Homo sapiens
ggcacaaagagccccgcacagcgccgcaggaccgcggacccgagaggcaggaacgaaccaacgcaggaccaggaaaccaag

SEQ ID NO: 244486 - RNA, 84 nt, Homo sapiens
gacgaaccaagacacccgaaggccgcggggccccgaccccccaggggcacagaagggaccacaaacgagggccaagaggacaca

SEQ ID NO: 244487 - RNA, 73 nt, Homo sapiens
cgcaaaccgccgaccggcggcgggcaagcgccgggacaagacagcgcaggcggaacgcgacaaacagcgaggc

SEQ ID NO: 244488 - RNA, 80 nt, Homo sapiens
agcggcgaggaggggccccagcagcccccgaaggcccacaggacaggagagaaagacggaaccaagaaagaggaagaaga

SEQ ID NO: 244489 - RNA, 74 nt, Homo sapiens
gaaaacaccaggaaagacaggagaccaaaaaggcccggcgaccggcagggagcagccgcccgccacgcgaggcc

SEQ ID NO: 244490 - RNA, 58 nt, Homo sapiens
acgcacccagaaacaaggcaggaagagaacacagaagaagaggagaggaaccagcaag

SEQ ID NO: 244491 - RNA, 82 nt, Homo sapiens
ccagaccagcagcgggcagacggcaccgcccaccgcgggggcccgggccccgcacccacgcgccccggcccggaccccggcg

SEQ ID NO: 244492 - RNA, 78 nt, Homo sapiens
cgagccaggcgccgagcggccccaacaggcccgccgcgccgggccagcggcgccgccgaaggggcacgggccccaccc

SEQ ID NO: 244493 - RNA, 79 nt, Homo sapiens
cagcagaggacccgaaaagcgaaaagaaacagagcaagaggaaagcgaggccggaccagagcaaaacagccaccaggca

SEQ ID NO: 244494 - RNA, 76 nt, Homo sapiens
aagccaccaccgcaaaggaagaacccaaacaacaaccggagcgggaaaaaggccagaacgaagaaacaaagaaaag

SEQ ID NO: 244495 - RNA, 62 nt, Homo sapiens
agaagggcaacgaacaagggcaaggcacacagagaaaaaaagggaacaaaacacagcaagca

SEQ ID NO: 244496 - RNA, 67 nt, Homo sapiens
aaccacccacgcaggcaggcaacggcaaagaacggaaggggcagcaaacaacagccaaccaagcgcc

SEQ ID NO: 244497 - RNA, 81 nt, Homo sapiens
acagaaacccggacgagaggcagcgagagggagacaagcggaggacaacgcagaagccaagggggagaggggaaggccgca

SEQ ID NO: 244498 - RNA, 73 nt, Homo sapiens
cccgggaggggggagcggcgggaggccaccgccaggagaggaagacgaggaagcagaagaacaccaagcccac

SEQ ID NO: 244499 - RNA, 69 nt, Homo sapiens
ggaaagccagcggagacgcgggcaccaggccgcaggacaacggcaagcggagaagagcaaggccgaacc

SEQ ID NO: 244500 - RNA, 56 nt, Homo sapiens
caggcggacggccagcccacacaggaaccgcggggcacaaaaccagcaaacagagg

SEQ ID NO: 244501 - RNA, 70 nt, Homo sapiens
caccccacagagagaaagagcccagcgagccagagcggaaggccaaagacagacgggcccagcacacagg

SEQ ID NO: 244502 - RNA, 51 nt, Homo sapiens
caccccacgggagggcagaccagagagaacgcccaagacaagacgacaaga

SEQ ID NO: 244503 - RNA, 81 nt, Homo sapiens
cccgggcgcccaagcgacagcgcagaggggcaggagccgggagccaccgcgaagcagccccgcaaagggaacaggaagcag

SEQ ID NO: 244504 - RNA, 78 nt, Homo sapiens
aagccggagaaagaggaggcggaagccggccaaaggggacaagggggaccggagccgggcccggcgcagaggggcggc

SEQ ID NO: 244505 - RNA, 60 nt, Homo sapiens
ggagcccggccccacaccggcacacagcgcccagaaaaagagaccaggagcgcgcaaaag

SEQ ID NO: 244506 - RNA, 78 nt, Homo sapiens
cgcagagagccccagcaggaaggccaccgagggaacccgaccggacccagccccagaagaaacggaacaccgggcaga

SEQ ID NO: 244507 - RNA, 71 nt, Homo sapiens
agaggaccgcaggcaggaacacacgaagccagcccagccccccagccagcagcgcagcgcccgcagccacg

SEQ ID NO: 244508 - RNA, 95 nt, Homo sapiens
ccagggaccccccccggccaggacaacaccgcaggacggaaagggagacaacagccacacaaagcagcaacaggagcagggaagaaaaggggaga

SEQ ID NO: 244509 - RNA, 62 nt, Homo sapiens
gacgcaaaggccaaggggcggcaaaaaggacaaagcagccaaccagagaaaagaggaagggc

SEQ ID NO: 244510 - RNA, 73 nt, Homo sapiens
gaggggagcccgcgcccgccgcgggagagaggacccccccccccccccaaggagacacacaaggagaggagaa

SEQ ID NO: 244511 - RNA, 73 nt, Homo sapiens
aggagagaaaggcggaagacgaggcgcgcacgaaaagaccagccagaagcgagccgaaggaagacagggcggg

SEQ ID NO: 244512 - RNA, 70 nt, Homo sapiens
gagaccgccgcgcagccggaggggcgaggggcagcgcgagagggaggccagcgagagcccgggccgaccc

SEQ ID NO: 244513 - RNA, 69 nt, Homo sapiens
gagggcgccacggcaggggcgagaaccagaagccacaggccaaccaagcaaagcaaacaaagccagaac

SEQ ID NO: 244514 - RNA, 70 nt, Homo sapiens
cagaggacccaacaccagaagacacacaggggggaaagagcccgggagaggcccgcgccaccccgggggc

SEQ ID NO: 244515 - RNA, 39 nt, Homo sapiens
cacagggagaaaggaggggagcacaagagcaaaacagag

SEQ ID NO: 244516 - RNA, 68 nt, Homo sapiens
gagagaaagagggacagccgcacggaggcgaaacacaaagggaagccacagggggcagcgcggagagg

SEQ ID NO: 244517 - RNA, 77 nt, Homo sapiens
acaggagaacggaaaggacggaagagggaacaacggcgccagaaggcaagacgcagaggggccacaagaacaccgag

SEQ ID NO: 244518 - RNA, 68 nt, Homo sapiens
aaccaagaaacaacacgcgagcacagcgaaaaaaaccccgaagaagagaaagaggcagcagcacgcga

SEQ ID NO: 244519 - RNA, 99 nt, Homo sapiens
aggcccggcgcgcagggcgggggcgccccaggagccggacaggcccagcaggcgcagcagcaagagggaaaaaggcaacgggaccgcggcaaaggccaa

SEQ ID NO: 244520 - RNA, 71 nt, Homo sapiens
acgagcaaaaggaagcaacccagaagagcgaaggacccagcgaggaggaggggggccagcagcaagaacag

SEQ ID NO: 244521 - RNA, 77 nt, Homo sapiens
ccggcgcccccgccccgggaccgcggggagggcccgcgagagggccaagggcagggagaagggacaacacagaacac

SEQ ID NO: 244522 - RNA, 73 nt, Homo sapiens
gggcgggagcgagcaaaggacaggacaaccccgcccaacacccaccgagaagcagagcagacaagggcccaca

SEQ ID NO: 244523 - RNA, 75 nt, Homo sapiens
cagaaagaaccacccagagagggcgacgccagaagccaggaacccaaaacaggacgaccacgaaaaaagagggac

SEQ ID NO: 244524 - RNA, 59 nt, Homo sapiens
agccgcaagccgcgaggccacgccccgcccaggccggacccgacgacacggccgcccag

SEQ ID NO: 244525 - RNA, 68 nt, Homo sapiens
acacgaggcagggggccacacgcaaggggaacagagcgcaaaagacaacccacgaaaaccacacccag

SEQ ID NO: 244526 - RNA, 78 nt, Homo sapiens
gcaaggaaaagaggagcagacacggggcaggcgagcccgccacagagccgaaagacagaagcccgggggagcggagga

SEQ ID NO: 244527 - RNA, 79 nt, Homo sapiens
ccagacaggaccagggaggagcaggaaagagaagggaagcaagaacgcgggaggagacaacgggaacaaaggagaaagg

SEQ ID NO: 244528 - RNA, 90 nt, Homo sapiens
gaaaagagagaaccccaaccggggaggaaaaccgacgaagaccaagacggacagaacaaaggggggaacaaacaaacccagccagcagaa

SEQ ID NO: 244529 - RNA, 56 nt, Homo sapiens
ggaccagaccaagacacacaaccaaacaggagaaaaaggccaggaccagaaacaag

SEQ ID NO: 244530 - RNA, 89 nt, Homo sapiens
aagaagcgcaccccagacaacaggcaggggaggaccagcggaaggacagaaaacgggccccagacacaagccccaccaagaggacaccc

SEQ ID NO: 244531 - RNA, 77 nt, Homo sapiens
gggaagaaaagaaggggcagagaaagcagggaaaggagagcaccacacaaggaaaggaggacacccaagcacccgga

SEQ ID NO: 244532 - RNA, 76 nt, Homo sapiens
cgcagaaggagcggagcggcagcagaaggaggcacaacggaaacggagaagaccgaaaaagaaaaggaagaagcaa

SEQ ID NO: 244533 - RNA, 79 nt, Homo sapiens
gaggaaccgagcgcccagccagcccagcaaagagaccgacagagccacaagaaacaaaggcacggcacggccggcacac

SEQ ID NO: 244534 - RNA, 68 nt, Homo sapiens
aagaagggcaaacgggaggcgacagggggaaaagcccaaaggaacccaaacaggccacaaagcaaccg

SEQ ID NO: 244535 - RNA, 84 nt, Homo sapiens
caagagacaacaggcccccaaaaaccacacccggcgaaacgacaagagggaaaaggagggacgaggaagacccacaggcagaac

SEQ ID NO: 244536 - RNA, 87 nt, Homo sapiens
ggcgcgcggaggaggcgcagcagcggaagaccccagccaggccaaacgaccaagaaagcgggacgcggaaaacgggacccgcagggg

SEQ ID NO: 244537 - RNA, 70 nt, Homo sapiens
caaaacggaaggcgcgcaagagaggagagcaggccacaggaaaccgaagcccccccagccagccaggagc

SEQ ID NO: 244538 - RNA, 86 nt, Homo sapiens
ccagagaggcagcagcccggaggccccagcgggcgggccgaggagaacgggacccgcaccacgggagaaccagacgcgggccggga

SEQ ID NO: 244539 - RNA, 75 nt, Homo sapiens
cgggggaccaccgggaggcaacacggccaagaagaggaaaggcgaacaagaggcgccagcgggcgcgccggaaga

SEQ ID NO: 244540 - RNA, 74 nt, Homo sapiens
gcccagaacagcaagagaagacgacaacggacacaggaacgccacaagaaacaacagcaaggcgagggccacga

SEQ ID NO: 244541 - RNA, 109 nt, Homo sapiens
gagagcaagaagcagaagcgaaacccaggacagaacgcggagagaccacagggggaaccggcccgaagccgaaagcgcggagcgggccacccaccggacaagaaacggc

SEQ ID NO: 244542 - RNA, 57 nt, Homo sapiens
agccaaaccagaagaggagggcccagaagaaaaaggcgagagagacagccggccacc

SEQ ID NO: 244543 - RNA, 49 nt, Homo sapiens
caagacaccacggacgagagacaaacgccgaaggcgaaccccaaaggga

SEQ ID NO: 244544 - RNA, 74 nt, Homo sapiens
aagacgcggaacagcacaccaggagagaagcgacagccgcagcacagcaaacgacaaggcaggagggggaaaaa

SEQ ID NO: 244545 - RNA, 78 nt, Homo sapiens
gaagacaccagaacggacaagcagaagaagaagggaccccaaaagagccaagcccagagacacaaggaagcgagggag

SEQ ID NO: 244546 - RNA, 70 nt, Homo sapiens
ccggaagagcgcagaagccggaagagagccaagccaggcccagcagccgccaccgaccgagcgccgcacc

SEQ ID NO: 244547 - RNA, 76 nt, Homo sapiens
accaaaaaggaccaacgagccagagcaaaaccagcccagagaacaagaggaacagcgggaaaaaaaaaccccgcaa

SEQ ID NO: 244548 - RNA, 83 nt, Homo sapiens
gaaaacgaagagacggaggaaaccacaggacggaagcacaggggccaccagagcgcccgagaaacaacggcaagcggagaaga

SEQ ID NO: 244549 - RNA, 78 nt, Homo sapiens
gcccaagacccacaacaaaagaccccagcacagggaggaggcccggagcggcggacggcacgacgacccagcgccacg

SEQ ID NO: 244550 - RNA, 66 nt, Homo sapiens
gaccacaggaccaggaaaagacaggaaaaggagcaaccagcggcacgccacaagccagccgcaccc

SEQ ID NO: 244551 - RNA, 84 nt, Homo sapiens
agggcggagacagagcaagaaaagcccgggagcagaagggaggcccaagacccacaacaaaagggaagagaaaggggaaacaaa

SEQ ID NO: 244552 - RNA, 68 nt, Homo sapiens
acaaacagacccacaagagagacgggacagacaaaagccggccgggagacccccaaccgcgggccggg

SEQ ID NO: 244553 - RNA, 59 nt, Homo sapiens
acacaaaccaaccacgccacaaccgcgcagcagacagggagagaacagcacacagaggc

SEQ ID NO: 244554 - RNA, 72 nt, Homo sapiens
caccgacgcacagcgaccaccaacagaccgaagggcaacaacacggcaccacacaagcgaagaagccgagaa

SEQ ID NO: 244555 - RNA, 74 nt, Homo sapiens
gcaaaagaaaaggcaagacaaccacaggcagagaggaaggagggccccggagcagccacaccaccgaggcccca

SEQ ID NO: 244556 - RNA, 57 nt, Homo sapiens
gaggcacagggacgccgaagccaaccagcagggacgcaccaaaacggacagccgaag

SEQ ID NO: 244557 - RNA, 82 nt, Homo sapiens
ccggaggcgccggcggggcgccgcggaccaacagcccaggaggccgagcgcgggaaagcagcgcagcccacagcgggccgcc

SEQ ID NO: 244558 - RNA, 74 nt, Homo sapiens
aaggggacgaggcaaaaagcacagaagagaggaccgacaagacggaaaccgggagggggaaaagcgagaaaaag

SEQ ID NO: 244559 - RNA, 84 nt, Homo sapiens
gaagcgccgggcagccgggaacaggcccggagcggccgccggcccaaagagcagagcaaagcggcagccccggacagggagggc

SEQ ID NO: 244560 - RNA, 33 nt, Homo sapiens
ccgcacgacaggcacaggccacagacaagagag

SEQ ID NO: 244561 - RNA, 80 nt, Homo sapiens
ggaagaggcaaagaggaagagaagaggaggaaacagaaaaccgcgggaaccagcaggccgggcacccgaccacgcaccgg

SEQ ID NO: 244562 - RNA, 76 nt, Homo sapiens
cgcggggacggaaccgggacccgggcgcccgcgcccgccccaacccagccacagacaagcagaccggaagaccgac

SEQ ID NO: 244563 - RNA, 77 nt, Homo sapiens
gccgggcccgcgcgcccggccaagaggcaaaggggaggacgcagcaaaccaccagaaggggaaccagaagaggccaa

SEQ ID NO: 244564 - RNA, 68 nt, Homo sapiens
aaccgacgcgcggaggagaagagacccggggaggcaggacccaaaaggcgggcgaaaacgccaaaaac

SEQ ID NO: 244565 - RNA, 74 nt, Homo sapiens
caagaagcagcggagaacagcaccggggggaagaagaagggaacaagcggagggacgcacgagaacgaggagcg

SEQ ID NO: 244566 - RNA, 60 nt, Homo sapiens
cgagcgcgcacaacgcaggaccggcgccgaaggcccgccagagcaagaagcccgaacgcc

SEQ ID NO: 244567 - RNA, 80 nt, Homo sapiens
aggagcacaggggcccgaaggccgcaggcagcccggggaggagcggagagggcagcaggagcgggacgagccacggaagc

SEQ ID NO: 244568 - RNA, 77 nt, Homo sapiens
ccgcacacgccggaggcaggggacaacacgacacaagcggccggggaagagccaggacaaaaccaggcagaaccaac

SEQ ID NO: 244569 - RNA, 86 nt, Homo sapiens
cgaccgggccgggagcgcgggcgcccgggcgcccgaggccccgggcgcccgccagcgcagaaccggccgaaaagcacaaacagcaa

SEQ ID NO: 244570 - RNA, 54 nt, Homo sapiens
agggggggaaacccaccgggaaaaggcacgaagggagagcggagggcagaaaga

SEQ ID NO: 244571 - RNA, 40 nt, Homo sapiens
gcaaggacccccgcgccagggggggccccagcccggccga

SEQ ID NO: 244572 - RNA, 69 nt, Homo sapiens
ccgcggagaaaaggcgacagcccgccaagacaggcaccagaaggagaaaagccgaaacgggaagaagaa

SEQ ID NO: 244573 - RNA, 75 nt, Homo sapiens
cagagcccgccagacccccgaaggcaaaggaccgggggacgaagggaacccgccgggcggcccggcacccagccc

SEQ ID NO: 244574 - RNA, 84 nt, Homo sapiens
gcgcacacacccgcgcgcgcccgggaggaaggaacgaggcaaggagcaaagcagcggcgcagcccgggggccaaaaccacacca

SEQ ID NO: 244575 - RNA, 71 nt, Homo sapiens
agacagacccgccagccagaaggaaccaagccgaggacaaccgagagagccaccacgaaggaagagagacg

SEQ ID NO: 244576 - RNA, 78 nt, Homo sapiens
aacagagccaaaccagaagaggagggcccagaagaaaaaggagcagaggaccacgagcgaccggaagccgcgggggac

SEQ ID NO: 244577 - RNA, 76 nt, Homo sapiens
gaagcgacgagccgcgaggagaggcgggaggccgaaggcaccaaccaaaaccggcgccgggcacgagaggaacaca

SEQ ID NO: 244578 - RNA, 65 nt, Homo sapiens
aacggagacacgaaggaccggcgcagcgcgaacagagaggccgcagaagggcagaagaacaggcc

SEQ ID NO: 244579 - RNA, 58 nt, Homo sapiens
acggaagagacagagagagccaaaccccagaacaacacggaggaaaccaccgagcccg

SEQ ID NO: 244580 - RNA, 77 nt, Homo sapiens
aagcaaggaaggacgagaccgaagaagaagcaggagacacaccagccaaaggaaagaaagcgcaaaaggccggaaag

SEQ ID NO: 244581 - RNA, 79 nt, Homo sapiens
agccccgaggagcgggaacaggagccccggcggcagggagcccgcgggggaaagacagcggaccagggcgcccgcggcg

SEQ ID NO: 244582 - RNA, 79 nt, Homo sapiens
acccggaagcggcagcgaggagacccggcgccgccaggccgacgaaaagcccaaggacccaaggccagccagccccagg

SEQ ID NO: 244583 - RNA, 78 nt, Homo sapiens
acaacagcaccagccgccagccgagaagaggcacacagagccggcagcgcccgagggagcaaggagaagagcggaacc

SEQ ID NO: 244584 - RNA, 81 nt, Homo sapiens
gggcagggcagaggacagcaagggacaacagaaggaaccaagaagaagcaggggagaagaagaggagcaacaggaagggaa

SEQ ID NO: 244585 - RNA, 74 nt, Homo sapiens
gcgccaagcgaacggagagccagccgggagaccacggagagcgaacaaagcaaggaagccccagaaaaagagag

SEQ ID NO: 244586 - RNA, 86 nt, Homo sapiens
aaaaagaggcgaaaggaagcaagcagcagaagagccaaggaaaaacagcaagaacccaaaaggcaaaaccccggacaagaaagcca

SEQ ID NO: 244587 - RNA, 79 nt, Homo sapiens
cgcacaccggcgagccaagccgcagccggcaggccggggaccacgagggcacgcggaccacccacccaaagagcaccga

SEQ ID NO: 244588 - RNA, 78 nt, Homo sapiens
acaaaccgcacgacacaggaaaggacaaaaccagaagcagggggagaccaaagaggaaggggaccaacacagagggag

SEQ ID NO: 244589 - RNA, 73 nt, Homo sapiens
cacagagcagcggaggggcagaaagcaagggaacgggaagggcacaggaagaaaggaccaaggaaacaggaac

SEQ ID NO: 244590 - RNA, 77 nt, Homo sapiens
agagaacaaaaaaaagaacggaaaaaaaccaggggaggcaggagagggcgaggagccagacaggcgggaacaaccag

SEQ ID NO: 244591 - RNA, 80 nt, Homo sapiens
aagcaggcagaaagcaaacaacaacggcagcgcggaggccacaagggagaaaccgaaaacaggcacggaccaccaagcag

SEQ ID NO: 244592 - RNA, 54 nt, Homo sapiens
gccaaggccgggacccacgagaagaaccaggggagaaagaaccacacgagaagc

SEQ ID NO: 244593 - RNA, 75 nt, Homo sapiens
gccagggccaccaaccccaacccggagagcggcgaggagccgcaaacacaccaaccgcaaacaagacacccacca

SEQ ID NO: 244594 - RNA, 84 nt, Homo sapiens
ggacaccggcggccccaccagcagacgcagccgagacaccagcccgaaacaccaccaagcccaggaccaaccagcccacgcaga

SEQ ID NO: 244595 - RNA, 82 nt, Homo sapiens
gaaagcgggagagggaccggaacggcggcgacaaggggcccgaacagagggccaccggggaccgcaaggccgcggggcccaa

SEQ ID NO: 244596 - RNA, 55 nt, Homo sapiens
acaaccagaagagaaggcagccaaacagaaggagcgggaaaagccaacaaggacc

SEQ ID NO: 244597 - RNA, 54 nt, Homo sapiens
caagacacaaacggcgacacagacgacacaagcccacacaaggaccggacccaa

SEQ ID NO: 244598 - RNA, 54 nt, Homo sapiens
ggcgcgcgcaggccggggagcgccaggcccccacagagagcacacaaacaaagc

SEQ ID NO: 244599 - RNA, 52 nt, Homo sapiens
cgccgacgcccgggcagggacggaaaaggcgcacacgacccggagaacccca

SEQ ID NO: 244600 - RNA, 106 nt, Homo sapiens
aaagacaccaccaagagcaaaaaagaaagcgcccagcgcaaaaacgaaacaggcgaaggaaaacgaaaaggaaaggaggccagacacaaaacgggaaccgcaaaac

SEQ ID NO: 244601 - RNA, 81 nt, Homo sapiens
ggaacgcaagccagaaaccccccagaacaacaaccagacgaccgaacggacagaccggaaccaagccggaccaggaggccg

SEQ ID NO: 244602 - RNA, 88 nt, Homo sapiens
cagaagccgaacaaccccagaaccccacggcagagcaaggggaacaaagcggcaaaagaacccacaaaaaaagccacaaaagcaagac

SEQ ID NO: 244603 - RNA, 80 nt, Homo sapiens
gacaggaaaaagcaaacagcgaggagagcgacaaggacccaccaacaccagagcccccacacccaggcccagcccagccg

SEQ ID NO: 244604 - RNA, 82 nt, Homo sapiens
ggcaggagagaagaggcagcagaagccagggcagcgaaagacagagacccaggaacaaggagggagcgcacccacccggggc

SEQ ID NO: 244605 - RNA, 75 nt, Homo sapiens
cagaggaggcagaggcaggcgccagacaaccaggcaagcggaagaaccgaacacacaaagcccgagcccccaccg

SEQ ID NO: 244606 - RNA, 41 nt, Homo sapiens
aggaggggcggcggcgggaagagggccaaggagaccgcacg

SEQ ID NO: 244607 - RNA, 76 nt, Homo sapiens
cgaggacaacgagaagacaaacccggcggcagagaggccccgagacccagaacgcaaaaccaaggcccggcagcca

SEQ ID NO: 244608 - RNA, 80 nt, Homo sapiens
gcgcggggggcggggacccggagcaagcagcgacgccagcggcggagaaccgacgaaagggaagagggcaggagacggcc

SEQ ID NO: 244609 - RNA, 75 nt, Homo sapiens
acaagaagcgcccgggagccccgggcaaaggccagcccgcaggcccaagcaaaacaacaagcggaggccggagga

SEQ ID NO: 244610 - RNA, 82 nt, Homo sapiens
ccccagacggggaagagacacgacagggcacacagggaccaagaagccccggggacacgcgagaaaagacgccgaagggaag

SEQ ID NO: 244611 - RNA, 78 nt, Homo sapiens
cagagaggaacgacaccagacagaagcagagagaaagaagcagagccagagacaccgagccaaacaaagaaagagccg

SEQ ID NO: 244612 - RNA, 72 nt, Homo sapiens
ccgcagcccccccagaaagcaagaaacccaggacagcagcggacaacaagcaggaagcagcaaaagaccaaa

SEQ ID NO: 244613 - RNA, 77 nt, Homo sapiens
cgccacgagcgcaaaagccaggaaccagcagccagagaccaagcagaagaaccgcgaaaggcaggcagcccacagca

SEQ ID NO: 244614 - RNA, 79 nt, Homo sapiens
ggcgagaaacccccgccaacacaccacgggaccgggcaagggaagaaaaggaccaccacccacggcacgaccacgagag

SEQ ID NO: 244615 - RNA, 105 nt, Homo sapiens
cagcaacggagaccgcagaaagacagagcacgaaaggcaacgcggcccaaccaggaaggagacgccaggaggccagggcagcaccgggcagcgagacgaaaaacg

SEQ ID NO: 244616 - RNA, 81 nt, Homo sapiens
cggaccaccggcggggaggagaccaggcgacaccgcgacaccccaacaaacaccagcgcggcaccgcacccacaaagccaa

SEQ ID NO: 244617 - RNA, 73 nt, Homo sapiens
ccaaaccgggcaaaacacccccgggacgcccccacccacagcaggaaacaaaccaggagccaaagcagaacgg

SEQ ID NO: 244618 - RNA, 70 nt, Homo sapiens
agccggccacaggagaacgccgaagagggggaaccgacacgcagcaacaaggagacgggaagcacagcga

SEQ ID NO: 244619 - RNA, 53 nt, Homo sapiens
acagagaaggagaagacccagcaacggaacggagaaagacagcaaagaaaagg

SEQ ID NO: 244620 - RNA, 81 nt, Homo sapiens
cagcggacccgccaccacaggcaccggacccacccagggaacccccccaccccccgacggggcgaggcccaggcgcccccc

SEQ ID NO: 244621 - RNA, 84 nt, Homo sapiens
agccgcaccagccgcccaagccgcacagccgcggcggcagcagcaggagagcccccgcccagccgcgagccagacccaggcccg

SEQ ID NO: 244622 - RNA, 49 nt, Homo sapiens
ccacccaccgcccacacacgcccaccgggcagaccaccggggcggcccc

SEQ ID NO: 244623 - RNA, 77 nt, Homo sapiens
gaggagccagggcccggcccgaaaggagagccgcagaggggcgggcaaaggagaggcacaggaagcagaggcaagaa

SEQ ID NO: 244624 - RNA, 79 nt, Homo sapiens
gaaccaagcacacggccgaaaaaggcaagacaacgcagaaaccaaagaaaaacgccacccaaaacggaaacacacagag

SEQ ID NO: 244625 - RNA, 77 nt, Homo sapiens
gaccaaaaacagaaacccagaggacaggaaaagccagagagcggcagagaagaagggaggcccaaagagcaaacaaa

SEQ ID NO: 244626 - RNA, 67 nt, Homo sapiens
gagcgcagaccgggggaaggagagacaacggcaagcggagaagagcaaggccgaaccgagaggaagg

SEQ ID NO: 244627 - RNA, 72 nt, Homo sapiens
ccagacagcgaagggacaacagagacggggagagacaaccagagcggaaagggagaaaagcccccagaaagg

SEQ ID NO: 244628 - RNA, 92 nt, Homo sapiens
cgaaaagggacaagcagagcacgacagccggcgaagaagaagcagggcacaaaaccgccccagccaggaggcagcagccaaggaaagccagg

SEQ ID NO: 244629 - RNA, 76 nt, Homo sapiens
gcgagccaccaggcgagcgaggagccaggacccggaaagagcacagcaaacaacaggccaggcgccagaacacagc

SEQ ID NO: 244630 - RNA, 73 nt, Homo sapiens
caaccacaccccccccaaaccgagccaaaagcggcaaggcaacaggagaagggaaaaagcccacaaaggcaag

SEQ ID NO: 244631 - RNA, 73 nt, Homo sapiens
ggagagacagagcaacgaaaggagcgggccaggaggccccagggcaaccgcaaagaacagcagggcaagagcc

SEQ ID NO: 244632 - RNA, 88 nt, Homo sapiens
gacggcaacgggacaggaagaagcggagggcgaggaggagcagaggagcacacagagaagcaggccccggccccaacaggcccgcgcc

SEQ ID NO: 244633 - RNA, 67 nt, Homo sapiens
cccagacacaagcaccaaaaccagcaaggagagggcggcagccagccaggaagcaagaggcggccca

SEQ ID NO: 244634 - RNA, 83 nt, Homo sapiens
gaccgcgcaagccccagacgagggcccgacccaggcaagcgagcaggcgagcaggagcccacagccgagcagcggcccagagc

SEQ ID NO: 244635 - RNA, 54 nt, Homo sapiens
gagggaggagcccagaccgggcgacccgccaacaccaccggacgggggaaaagg

SEQ ID NO: 244636 - RNA, 79 nt, Homo sapiens
acacggaagagagccccaggccagaagagagacccgacgacggaccgcacacggagaaggaagcagacggagcaccgga

SEQ ID NO: 244637 - RNA, 79 nt, Homo sapiens
ggcgccgagccgcggccgaagcccagccacagagcgagaaggaaaaaacagggaagagaaaaagagcagaaggcacgga

SEQ ID NO: 244638 - RNA, 66 nt, Homo sapiens
cgccaccaaccccgacaggaggggccaaccgaaaaaacaaccagagaggcggacagcagcagaggg

SEQ ID NO: 244639 - RNA, 79 nt, Homo sapiens
ccaagccccagccggagaaggagcccacaacaaccacaggggaccgagacccgacgagagagacgaggggaagagagga

SEQ ID NO: 244640 - RNA, 41 nt, Homo sapiens
caggagagggagaccaaaggcgggggaccccccgacgcccg

SEQ ID NO: 244641 - RNA, 74 nt, Homo sapiens
caaaaaacaaaaaggggcgagggacaaggagggacgaagaggcggacccccggaggacaagccccgcacagggc

SEQ ID NO: 244642 - RNA, 70 nt, Homo sapiens
gagggaacacagacccagccgccaagaccacgaaaaacacacaacacgacgcagaccccaaaaggaagag

SEQ ID NO: 244643 - RNA, 35 nt, Homo sapiens
cccaaggcgaacaaaagaagcacgaagcaccaaaa

SEQ ID NO: 244644 - RNA, 72 nt, Homo sapiens
gccaggccgagcgccgcgcccgcccagaagacagcagaaaagggaacaaccccaaaaaaccgacacccggga

SEQ ID NO: 244645 - RNA, 40 nt, Homo sapiens
cgaacccaaaagcgaacaggagagaaagaaagggcgccgc

SEQ ID NO: 244646 - RNA, 75 nt, Homo sapiens
acacggagcaaggaaaagagcccggaaagaagcaacagagaggggagaacccacaggaaaaacaacaacggggca

SEQ ID NO: 244647 - RNA, 82 nt, Homo sapiens
ggaacaagaggccacgcagagccacgccggccagcggcggggcagccgagggcaggagcaagaaggcgccccccggccgggc

SEQ ID NO: 244648 - RNA, 76 nt, Homo sapiens
gagcaggcggcagcagccgccgagggcgccgccaggagaggaggcagcagccgcggcccgaagaaggaaaagcgac

SEQ ID NO: 244649 - RNA, 79 nt, Homo sapiens
aagcgagggcaaaagccacagacaccgagagccggaagggagaccagcacgagccgggcgggacgccggaaggggcaca

SEQ ID NO: 244650 - RNA, 89 nt, Homo sapiens
ccaggccccacaagggccccagcccaggaacgaacccaggcgcacaggagaagagacccaagaggaaggcagcgaggcacaggccccac

SEQ ID NO: 244651 - RNA, 48 nt, Homo sapiens
gggggagaccgggcccggcccccccggaggaaagcaacggcgcaagcg

SEQ ID NO: 244652 - RNA, 74 nt, Homo sapiens
ggaggcccaaccaagaaacaacacgcgagcacagcgaaaaaaaccccgaagaagagggggagcgcaaccgcacg

SEQ ID NO: 244653 - RNA, 81 nt, Homo sapiens
cggcggcccgaagccagcgccccaccggggcaagcaggagggccccaaggcggcagccccgaccgacggggcaacgcgaag

SEQ ID NO: 244654 - RNA, 83 nt, Homo sapiens
gacgcgggcccgagcagccgccccgccggagggcagggacaaacagaggcagggggacaagccaacacgaacggagaggaagg

SEQ ID NO: 244655 - RNA, 73 nt, Homo sapiens
cgaagggggaaccgccggccccaagggccgaccagcagacgggaagcggggcaccaaccgcaggaagcagcgc

SEQ ID NO: 244656 - RNA, 74 nt, Homo sapiens
cggcaccacacgcagaacgggcggacgggcgcccagccaggcgggagaccagggccagcccggccacaccccag

SEQ ID NO: 244657 - RNA, 39 nt, Homo sapiens
gaccccaccaaggcgaggacaaagccgcccggcccaggc

SEQ ID NO: 244658 - RNA, 74 nt, Homo sapiens
ggccaaaagaaaggcagacgaagggaaagcccagaacacaagagccaacaagcaagaagacccaggaaaacccg

SEQ ID NO: 244659 - RNA, 43 nt, Homo sapiens
ccaagaagccagcaagcggccagcgggaggccaccgccccacc

SEQ ID NO: 244660 - RNA, 80 nt, Homo sapiens
aacaagcaagcagcagcacgcgaaagagccgacacgggcggaggcccgcaccacggcgccagccgagaccgccaagagcc

SEQ ID NO: 244661 - RNA, 61 nt, Homo sapiens
cgagagccgaagcagaggccaagaccaaccccgacacagacggaagggagggccacccacg

SEQ ID NO: 244662 - RNA, 70 nt, Homo sapiens
acaaccacagaaaaggccacgacccaccccgaagagcaacggaaccagcgccgagcagggagaccagagg

SEQ ID NO: 244663 - RNA, 76 nt, Homo sapiens
aggaggaggcggagcggggcccgacggcgccggggaaggaaccagaacggcaccccccccccggcccggacgcgcc

SEQ ID NO: 244664 - RNA, 71 nt, Homo sapiens
cccaccggagacacaggaacaaacgagcacgcaacacagaaggaaaaagcagcgaaaaccgacgggcgcac

SEQ ID NO: 244665 - RNA, 66 nt, Homo sapiens
agaacgacagagaggagggagaacaagcaacggcggacggagccaccaccaccccgagagacggac

SEQ ID NO: 244666 - RNA, 75 nt, Homo sapiens
gccggggcgaggacaccacgagacgagagcaccgaaacaagcaccaagccccagaacagcccaaaggcccggagg

SEQ ID NO: 244667 - RNA, 79 nt, Homo sapiens
ccagcagcagccaaaggacagaccaggaagagcagaagggacgagcgcggagaagacgcagaaaagggccacggaagaa

SEQ ID NO: 244668 - RNA, 77 nt, Homo sapiens
acggagacaagcgaaacgaccagaccaagagacagaaccagcaccagggcaaaacgaacagagcgaccagaaggggc

SEQ ID NO: 244669 - RNA, 67 nt, Homo sapiens
gagaagccgaaagaacaggacccaggggccaggcgaagggaggaggcagcgaaaacacaccaacgca

SEQ ID NO: 244670 - RNA, 63 nt, Homo sapiens
acggagaagaagcgcggcccacacacccagccgggacgcaggaggaaacccagaagcggaaca

SEQ ID NO: 244671 - RNA, 87 nt, Homo sapiens
aagagcagaaaaagcagccaggaaccaagaaaacggaacagcgaccagcaggacccaggagaagcgccggacagccagggccgaggg

SEQ ID NO: 244672 - RNA, 67 nt, Homo sapiens
gaagcgccaaaggaccggacccagagaagaggaaaaccaccgggcagagggccacaaaccaaagggc

SEQ ID NO: 244673 - RNA, 69 nt, Homo sapiens
aacaggaaaaagaccccacgcagaggggcaaacacccgagagggaccacagggaacaccgcgacacccg

SEQ ID NO: 244674 - RNA, 54 nt, Homo sapiens
cgaaaacaccaggaaagacaggagaccaaaaagaaggccggcgccacagagcga

SEQ ID NO: 244675 - RNA, 59 nt, Homo sapiens
caccacccgaagacgaaggggacggagcgcccccccgccagagaccaccagccggagga

SEQ ID NO: 244676 - RNA, 78 nt, Homo sapiens
agggagagcggcaacacggcgaggccggacaacgaagccaggggaacagcaagacagcaaggaaacccaagggccgcc

SEQ ID NO: 244677 - RNA, 77 nt, Homo sapiens
gcagcggcccgggacggccaacgccaagaggggagcgcccccagcgcagagccaaaggagaagggaaaagagcgaac

SEQ ID NO: 244678 - RNA, 55 nt, Homo sapiens
cgccagggacgagcagaaaggggacggccaccgaagcaagagcagaggcagggaa

SEQ ID NO: 244679 - RNA, 44 nt, Homo sapiens
cccaaggaggcccagcgccaacaggagcggcgcccggaagcggc

SEQ ID NO: 244680 - RNA, 77 nt, Homo sapiens
gagaacccccagcacgccaccaaagacggaacccaacaagacccgccccaccaccgaacgagaccgggacagcggca

SEQ ID NO: 244681 - RNA, 53 nt, Homo sapiens
aaaaggacgagaacgccgcgacagaaagaaaagaacacccaacacaacgcccg

SEQ ID NO: 244682 - RNA, 67 nt, Homo sapiens
aagaacaaacggaaaaggccaacgcccaagggaagccgagaacgagcaaaaagcagaccccaccccg

SEQ ID NO: 244683 - RNA, 79 nt, Homo sapiens
cacagacacaaggcaagcggcgcggagcagcagcagcgccaaaacagaagaggcaaagcccagccacagcagcagccca

SEQ ID NO: 244684 - RNA, 79 nt, Homo sapiens
agcgacccgggcgaacaaaagaggccaaagaagaaagaaacgaagagccacggaaaaccgaaaccagcccccaagggga

SEQ ID NO: 244685 - RNA, 77 nt, Homo sapiens
acagcaccagcgggccggaggagccagagcgcagaaagaccagggcaggacaaccgaaggacaaaacaccgcagaaa

SEQ ID NO: 244686 - RNA, 73 nt, Homo sapiens
caaaagccagcaaaggagaccaaggcgaaaaagcagagagaaaagaaaaggagccagggaagaacaaaaggaa

SEQ ID NO: 244687 - RNA, 52 nt, Homo sapiens
ccccgagcgaggacacagcccgcggaggcagcggaacccaacacagggaggg

SEQ ID NO: 244688 - RNA, 69 nt, Homo sapiens
aaggaccaagaaccaggaccaaaacagggaaggaagaaccaggagggaaaaccccagcgggcagaccaa

SEQ ID NO: 244689 - RNA, 85 nt, Homo sapiens
ccgaccccgcacccagccggaggcgcacagggacaagcggacgagcggagcaggagcgcaaggcgcacagccagacaaaccgcgc

SEQ ID NO: 244690 - RNA, 75 nt, Homo sapiens
ggggagcggaagggagagcccgcccggcccggagaagaaagcgaggggaaaaggaaggaaaccgggccagggaga

SEQ ID NO: 244691 - RNA, 82 nt, Homo sapiens
ggagcaaccccaagcaccacaaaaaccacgagagcccgcccaacaaacagaggacaggaagaagccacacacagaagaccca

SEQ ID NO: 244692 - RNA, 84 nt, Homo sapiens
agagccggcccgacaccaagcacgagaacaggacggcggacaaggcccagaacaagcacaacaagacccaaagcccgcagcgac

SEQ ID NO: 244693 - RNA, 78 nt, Homo sapiens
gggccgaggagccacagaggagggcccgggaaggaagaagaggaaaggcagaagagagaacgccaaagaaaccaaaca

SEQ ID NO: 244694 - RNA, 72 nt, Homo sapiens
cacccccacccgagcagccagagcggaccggggcagaccaaacggcaagaagacacaaggagaggcggaacg

SEQ ID NO: 244695 - RNA, 74 nt, Homo sapiens
caccagcgcccccgcccaggagaccagcggccaaccagccccccgcaggcgcgcaacgcgggggccacacagaa

SEQ ID NO: 244696 - RNA, 77 nt, Homo sapiens
ggaggagcccgccgaagcagggcagggcgaggaaaggagacggcaccaaccaaagggaggcaggaagaaagaagcaa

SEQ ID NO: 244697 - RNA, 77 nt, Homo sapiens
accacagccacccgggagagcccggaaaggcccgcggcgaggagcgagcagaggcacagaaaacgaacgagaaacga

SEQ ID NO: 244698 - RNA, 79 nt, Homo sapiens
agcacccaagagaagagcgagccgcagccgacaaagcaccacaggacaaccaggccccaagagagcgcgaacccagaga

SEQ ID NO: 244699 - RNA, 70 nt, Homo sapiens
cggcgcgcgccagaccggcgagcccgagcagaagggaccagcgcaaacggagaacagagcgacaaaggaa

SEQ ID NO: 244700 - RNA, 80 nt, Homo sapiens
gccggggccggccgggcgggcaggagacagaagaaacggcagaggccaaggggaagccagacagacagggccgaccaggg

SEQ ID NO: 244701 - RNA, 81 nt, Homo sapiens
gcggcggaggagagccgcagagcgcgcagaccccgacagaagcgaaggggacagggggagaaccgccagggaaacccgggg

SEQ ID NO: 244702 - RNA, 80 nt, Homo sapiens
cggggggaggacccgaccaggggagcgacaggcagcaggcgacagccaccccggagacacgggagaggcgagcagcgggc

SEQ ID NO: 244703 - RNA, 76 nt, Homo sapiens
cgcccacccacggggaccagcagccgggccagggccagagcaaaggaaacaaacagaagcgcacgagaacccaggc

SEQ ID NO: 244704 - RNA, 73 nt, Homo sapiens
cacgcgcagaggccggagagcagcaagaggcaagcagggcccccgcgcgcggccaagggaaccaggaagccca

SEQ ID NO: 244705 - RNA, 81 nt, Homo sapiens
ccaacgccacggaccagaagaaacacgggccggggacaaagcccccagaggaaccggggcacaccaagaaaaaccagaaac

SEQ ID NO: 244706 - RNA, 75 nt, Homo sapiens
cagacgagcggaaggcgaggccaggagggagagaccggccacaggcagacggcagggccggcgggggaagcaccg

SEQ ID NO: 244707 - RNA, 79 nt, Homo sapiens
gccaccagacgaggaagacccggaaacaggggccacggagccacggccacggccgcaagccaaccgccgaaaaaaggac

SEQ ID NO: 244708 - RNA, 78 nt, Homo sapiens
agacaaagccccccaaacaccacaagggcgagggagaaccaacagcagaagaagcgagcccgacgccaggaggagcga

SEQ ID NO: 244709 - RNA, 71 nt, Homo sapiens
gcgaggacccgagccaggcggggacaggacggcggggcgagccaggaagccgcgagcagaacgcgccagca

SEQ ID NO: 244710 - RNA, 92 nt, Homo sapiens
acacaagaagagaagcgcaagggaccagggaacgcgagacagaaccgagcgaagcgccaggaacacaagaaaaaagcgagccggaaggggaa

SEQ ID NO: 244711 - RNA, 78 nt, Homo sapiens
gaggagaaggggaagaacaccagggggggagagcaggaccacacaaagcaaacacaccacgacggccgcgagcgggag

SEQ ID NO: 244712 - RNA, 71 nt, Homo sapiens
cgaaaagagcagaggagaaaggaaaccggccacggggcaggggaccaaaacgaagagaggggaaaaggaga

SEQ ID NO: 244713 - RNA, 56 nt, Homo sapiens
gacacaagacagacaaaccaggaaccgcccaaagaagcccaggacaggagaagcga

SEQ ID NO: 244714 - RNA, 61 nt, Homo sapiens
gcaggcgccgcccacagcaggcgcccgccagggaacagccggcaggcgaacaagaggcgcc

SEQ ID NO: 244715 - RNA, 72 nt, Homo sapiens
caagccaaccacagccaagagcagccaaacgacgccacgaacaaaagagaggaaaacccccgagacaaacac

SEQ ID NO: 244716 - RNA, 80 nt, Homo sapiens
ggagccgaagccggagggccacccgacgcagagggcaggccccagccaggcaagagcaacgaaccaaagcaaaggaggcc

SEQ ID NO: 244717 - RNA, 75 nt, Homo sapiens
aaaggacaacaaaagagaaggagaaagacagaaccagcacagcaaaaaaggcagcgcaccgaccccaacgaacac

SEQ ID NO: 244718 - RNA, 85 nt, Homo sapiens
caccacaaaaaccacgagagcccgcccaacaaacagaggacagggcaggcagcggaagagaaagaccgaggcaaagaagcaggag

SEQ ID NO: 244719 - RNA, 80 nt, Homo sapiens
agggcaggacgccggggaaacaggaggagacaacaaaaggaacccacagcccccgagaaaagccggaaaacagaagcaca

SEQ ID NO: 244720 - RNA, 80 nt, Homo sapiens
gaaaggagcgccccaaaaggaaacagcggcagagaggccccgagacccagaacgcaaaaccaaggcccggcagccaccca

SEQ ID NO: 244721 - RNA, 101 nt, Homo sapiens
aagaggagcgacagcccagagaggagacagccggccagaggaggaaagggccgcgaagaaacacagcccaaagaaacacacccccccacaacaaggcccaa

SEQ ID NO: 244722 - RNA, 75 nt, Homo sapiens
cacccaagagggccaagccagaaaacagaaacgaaacagaacagagagaagcccaggacaggaggaagcacaccc

SEQ ID NO: 244723 - RNA, 80 nt, Homo sapiens
agcagaaagcaaaccagcaggcaccaaggaaagcagaagacaagaaacaacgggaagacacggagaaaaacggccagaga

SEQ ID NO: 244724 - RNA, 71 nt, Homo sapiens
ccgccaaaaccccccacacaccccgccgggacccgaagacaaaaccacccacgaaagcgaaaagacccaaa

SEQ ID NO: 244725 - RNA, 42 nt, Homo sapiens
gcgggggaacagcagcggcaaggggaaccccgccagacagcc

SEQ ID NO: 244726 - RNA, 80 nt, Homo sapiens
caagcgccccggcgacagcccagacgggcaagcaagagccaaacagaagaacaccacacaacgccacaaaagaaagaaac

SEQ ID NO: 244727 - RNA, 70 nt, Homo sapiens
aggaaaagaaaagcacagggagcgacgcacccccaaggccaaccaagggcacacccagagcccccagcag

SEQ ID NO: 244728 - RNA, 66 nt, Homo sapiens
aagaacagagagaacaaaagagcagcggcaaccaagccgggaaaaaagcaaagggaaacgccgcca

SEQ ID NO: 244729 - RNA, 67 nt, Homo sapiens
acggacacaacgacagacccaaacgggggaggacacgccagaaagcaaaagagccacaaggaaggag

SEQ ID NO: 244730 - RNA, 42 nt, Homo sapiens
ggcggcggcgaaaagaccaggcgaagaacgaaacggccaccc

SEQ ID NO: 244731 - RNA, 68 nt, Homo sapiens
acgggggaggaaggccacagcaggaaaaaagcgcgaacgaaccccagcaaaacagaagaaggcaagga

SEQ ID NO: 244732 - RNA, 52 nt, Homo sapiens
cgccagagaaccgacagaagagagacaaccaacgagggcggcagggcacaag

SEQ ID NO: 244733 - RNA, 44 nt, Homo sapiens
cggaccgggccgggcgcccgcagcagagagcgcagaagacagga

SEQ ID NO: 244734 - RNA, 75 nt, Homo sapiens
aacccgaagaagaccaccgggagagagggaaaaaacaaccccgccggagagaaaagagggagggaaggaaaaggg

SEQ ID NO: 244735 - RNA, 104 nt, Homo sapiens
gaaaaaacccagaacacgggagaaaaaggaaaacgcggaaaaccgacacaacagagagacggcaacggaaagcccgggcagagacaagaccaggcgaggacggc

SEQ ID NO: 244736 - RNA, 63 nt, Homo sapiens
ccgggagcgcccccacccgcccgagccgggagcacagcagaaggacccagcagccagcgaagc

SEQ ID NO: 244737 - RNA, 88 nt, Homo sapiens
ggcggggcggcggccggcccccagcggccccggcccccggcgccccagcgaggaaggagaagacagcacggggagcccacaggccacc

SEQ ID NO: 244738 - RNA, 84 nt, Homo sapiens
ggagcacacccggagaagcaggagcccaccggcaggcccccccagccacgccgcgcccagccagcccaaaacgaagcaccacaa

SEQ ID NO: 244739 - RNA, 69 nt, Homo sapiens
cagacagacagcacgcagagcaagaacccaacagcacgaaaaaggaagagagcggcaaaacagcagccc

SEQ ID NO: 244740 - RNA, 62 nt, Homo sapiens
gcacagccacaccgcaccgcaggccgccccgaccgccgaacaaggccaggccacacaagccc

SEQ ID NO: 244741 - RNA, 74 nt, Homo sapiens
aagaagaacgacccgcccggggcagcagcgcagaaaaacgcaaccaacgggaagaggcccgacaacgcaccaag

SEQ ID NO: 244742 - RNA, 79 nt, Homo sapiens
acggaccccagccaccagaaccgggacacggaagaggagggaaggcaccgagagccggcggagaagacgaggccaaggc

SEQ ID NO: 244743 - RNA, 33 nt, Homo sapiens
ccagggaccaggcggacgggacggacgaaaggc

SEQ ID NO: 244744 - RNA, 71 nt, Homo sapiens
gaagcagggcgccgccacgccgcaggaggcggagacaccgaaaacgagaaacgaaagagacacgggggcac

SEQ ID NO: 244745 - RNA, 67 nt, Homo sapiens
gacccaggcagccgcgcaagggcccaaaacgacagacgcgaaaggggacgacgaagaggaacagaga

SEQ ID NO: 244746 - RNA, 76 nt, Homo sapiens
cagccccacccgacagaacggagcacgaaaacaagccgacaggagaaggccagaggcacggacgaccccggagaga

SEQ ID NO: 244747 - RNA, 65 nt, Homo sapiens
agaccaacacagggaagcaagccaaccaccagaagcgaagggggaagggcgagggcgggccagca

SEQ ID NO: 244748 - RNA, 79 nt, Homo sapiens
cagcacaggccacaaagcagaacacaagaccaacccgccaaaagcggccaaacgcagcccggcacagcggaggggaagc

SEQ ID NO: 244749 - RNA, 71 nt, Homo sapiens
gggaggccacagagacaagagagaggggcagccaggcccgcgccagccggaaaccccgaggaagaggaaga

SEQ ID NO: 244750 - RNA, 66 nt, Homo sapiens
acaaaccccagggaagaggaccaaagcgaacaggaacccgaaagacaaagcacggcgggggaaacg

SEQ ID NO: 244751 - RNA, 72 nt, Homo sapiens
gccaccgggaaccagcgagaaggggggccaccccaacgccaaggaccacccgcacccaggggacgcacggcc

SEQ ID NO: 244752 - RNA, 77 nt, Homo sapiens
gaacagccccagacggggcaccaacacacaagaccccgcgcaggcgacaggagacgccccagaggcgaagccacagg

SEQ ID NO: 244753 - RNA, 72 nt, Homo sapiens
gaacgggagagagacccccggcccagagaaagcgcgggggagcaaaaacagacaagccagaagcgaaccggg

SEQ ID NO: 244754 - RNA, 81 nt, Homo sapiens
cgggcaacgaccggcggggggcgcggcgccgggacgcaccgcaccgagggcgagcccagagacaggggccaggccaggggc

SEQ ID NO: 244755 - RNA, 87 nt, Homo sapiens
gccggagagccggccgagcgaggcggcgcggccagaagagaaggcaccggccaaagggggcgaccgggacaggacgacgacagcgcc

SEQ ID NO: 244756 - RNA, 76 nt, Homo sapiens
cggggcgcgggcagccacgcccggagacgagcgccaaagacagaagcaagcagaaaagagcaacaccgggggagca

SEQ ID NO: 244757 - RNA, 90 nt, Homo sapiens
ggacccgaaaaaaaagggggaccaaaagaacccagccaacccgcagagggaggggaggggcgagcggaggagagcggggcccaagaacca

SEQ ID NO: 244758 - RNA, 71 nt, Homo sapiens
ggaaggcccccggcgcgagacccgccggaggaacggaaggcgccagacacagaaaagaaagagagcaacca

SEQ ID NO: 244759 - RNA, 83 nt, Homo sapiens
ggccaccaagaccacacgggcggaggaagcacaacagaggcaagacgagacgcaaaagcgcagcggaacgcaacaagagacca

SEQ ID NO: 244760 - RNA, 70 nt, Homo sapiens
gccaaaaagcggcggaaagcgccaaaggaggcaacaagggagaagcagcaacggaggaagacgcacgccg

SEQ ID NO: 244761 - RNA, 110 nt, Homo sapiens
cacaccagccgggcacagcccacccacaccccagaacaccccgcagaaaggccggcacaggcaaaaacagcaaaagaaaagaaaaaacaagaaggagcgacaaaaagagg

SEQ ID NO: 244762 - RNA, 74 nt, Homo sapiens
caaacacgaagagacaaaagagggacacgcaggagaccccgaaggggaaaagacaaacccaaacggagaaaaaa

SEQ ID NO: 244763 - RNA, 98 nt, Homo sapiens
ccggagcaaccccccaggacgggcggaggcggggggaccggcgggcggagggaacaggcacgccccacccgccagccgagcccccgacgcagcacaaa

SEQ ID NO: 244764 - RNA, 74 nt, Homo sapiens
aagagagaaaagagagaaccccaaccggggaggaaaaccgacgaaggaagaagaacgcacccacgccggggaaa

SEQ ID NO: 244765 - RNA, 78 nt, Homo sapiens
acagcgaccacgagggcgaaccacccacagaccagccggaacaagagacccgacaagccgagaccaccaggagcagag

SEQ ID NO: 244766 - RNA, 72 nt, Homo sapiens
cccgcagcgcagccccgcacggaaagccaggccaaggccaaacacacaggaacgccagaccccagccgaggg

SEQ ID NO: 244767 - RNA, 71 nt, Homo sapiens
gaaaggaagggccaggacaccaggaaagaacgaacaacggaagcgagaaacgaggacgacagagagagagc

SEQ ID NO: 244768 - RNA, 70 nt, Homo sapiens
gggacgagcaaaggaagcgcgaacagcagcgcaggaaagcaaaaccagaggcccagaagagaaccaaagc

SEQ ID NO: 244769 - RNA, 80 nt, Homo sapiens
agacagccccaagacaaccccaccagcaccacagaggcgcagcagccccagccaggcaggaaacacccccaggagaggca

SEQ ID NO: 244770 - RNA, 46 nt, Homo sapiens
gaggggcggcggcgggaagaggccggaggcgcacaaaaccggaaca

SEQ ID NO: 244771 - RNA, 76 nt, Homo sapiens
cagaagagacgcggaccacgccagcccccgcccgagccagcgggaaccgaccgggaggcacacccggaaagagccc

SEQ ID NO: 244772 - RNA, 86 nt, Homo sapiens
gccgccgccgccgccaccaggcaaaagcagaccggaaaacccaccggcaagaccacacccgaggggagcccaggacaccacgaaaa

SEQ ID NO: 244773 - RNA, 75 nt, Homo sapiens
gcgggacaagagagccgaggcgcccccaccacccacaaggcaaaggcggaccgcccgagcggcgagcggcggagg

SEQ ID NO: 244774 - RNA, 64 nt, Homo sapiens
aggacaaggaacaggcagggccaggaacaacagaccagcccagcacagacagcgcggagcaaca

SEQ ID NO: 244775 - RNA, 70 nt, Homo sapiens
ggaagagagaaaaagcaacaaaaaaaaaagaagcaagcaaggcaaaccgacaccagcgacacaagcgcga

SEQ ID NO: 244776 - RNA, 82 nt, Homo sapiens
caccgcggaacaagaaaaagagccggacagaaagagacaaggaggggccgaacccccagggaagaagaacaagggacaggac

SEQ ID NO: 244777 - RNA, 99 nt, Homo sapiens
cagaggccacacccacagagaacccagacaacaggacgccgccaagggaacaggaccaacaccgaccccaagagaagaggaaagaggggagcaaccagg

SEQ ID NO: 244778 - RNA, 79 nt, Homo sapiens
cgagcccggccgccagaccacagcacagccgggaaggggagccaccagccccccgcaccccgacaaagccacagcccga

SEQ ID NO: 244779 - RNA, 42 nt, Homo sapiens
ggcacccaccagcccccgaggaagacaccaagacacacaaag

SEQ ID NO: 244780 - RNA, 74 nt, Homo sapiens
agccccgccccccgaccgcagaccccgacacaagggggagccgccagcgagcaggagacgaccggagcgccaga

SEQ ID NO: 244781 - RNA, 76 nt, Homo sapiens
aagcacaagaagaagacgaggggaacgaaacgcacacccggccccagcagccacagcggaggccccaaggacacgg

SEQ ID NO: 244782 - RNA, 71 nt, Homo sapiens
cccgcacagagccagagagaagagaacgaacgggaagcgccggacacaagagggcaagaaaggcgcgacgg

SEQ ID NO: 244783 - RNA, 78 nt, Homo sapiens
agggaagacgggccaaacaaggcaaggcaccggagcggaaaaaccgaacaagcaaacagcgacaaagagcaaagaagc

SEQ ID NO: 244784 - RNA, 65 nt, Homo sapiens
ccccagggagcaagagcaaagggcagaacacaagcgcaaagagggaaacagaccagggcaagccc

SEQ ID NO: 244785 - RNA, 87 nt, Homo sapiens
gggcccagcggccagcgcaggaggacgaccggggggcaggaggcacccggggcaggcaaagaaggagaaagccgagcacacgaggaa

SEQ ID NO: 244786 - RNA, 74 nt, Homo sapiens
gaacaagaaaacggacaagcgaaccacacaagacaaccgaagccaagagggaaagcccacaggaacggcaggac

SEQ ID NO: 244787 - RNA, 32 nt, Homo sapiens
agcagacgcaaagacgcaacgcaaaacacagc

SEQ ID NO: 244788 - RNA, 83 nt, Homo sapiens
ggagcaagagcaagacaccggacaccgagggcccccaaaagggggagacaacgaggggacccgcagcgaagagaagcccccac

SEQ ID NO: 244789 - RNA, 83 nt, Homo sapiens
agccagaagaagggcaggccagaaggaggcggggaaaaaggagaagccagaacaaagagaagaaacccgaagccaagaaggga

SEQ ID NO: 244790 - RNA, 76 nt, Homo sapiens
gggagccagaagcacaggcccgggcgaaggggccacgcgagcagcccagaaacaggacagcacgccggaagaagaa

SEQ ID NO: 244791 - RNA, 68 nt, Homo sapiens
acccgcgcgggcacacaaaacaccaaccaaaagacaccggacacgcagagccgcggcacccaggcgga

SEQ ID NO: 244792 - RNA, 76 nt, Homo sapiens
gggggaggggaggccgggcgagcaaaacaggaaacagcagaggcacacaggacaacgagggaaaaacgagaaccag

SEQ ID NO: 244793 - RNA, 71 nt, Homo sapiens
ggagaccgagaagcgagcacaaaaagaaagaagagaaccagaggaccagacccgaaccagcccccaaccca

SEQ ID NO: 244794 - RNA, 80 nt, Homo sapiens
gcaaggaaacaaagggaggcggaaccaggaagaagagcaacgggagcagaaggacaaaaacagaaagagacagagacagg

SEQ ID NO: 244795 - RNA, 74 nt, Homo sapiens
caggaggccgacaaggcaggagacagacaagaggagacgggcccgcgcgcacggcgcgggacacagggcgccac

SEQ ID NO: 244796 - RNA, 84 nt, Homo sapiens
ggaccggccgcaggccaccgacacgagacaaccgggagccgggccaagaggccaggagcgcccggaggaagcgcaaacggacag

SEQ ID NO: 244797 - RNA, 82 nt, Homo sapiens
agcgaccgccggagcgaggaccagggcgaacaccgagaggagcgggaaggccccgcacccggagaccgggggaagacaagca

SEQ ID NO: 244798 - RNA, 53 nt, Homo sapiens
agagcccacacccgcagagcgaggaccggaagggcccccaagccggcagggga

SEQ ID NO: 244799 - RNA, 83 nt, Homo sapiens
gacccaggcgccgggcgcggcgcagcgccgaggcgggcgaggcgccgcggaccagaggcgccgagaaacagcacccaggacac

SEQ ID NO: 244800 - RNA, 87 nt, Homo sapiens
cggacggcgggaggacacccaccgccgcgggaggacccagacagcggccccccacgagcccggacaaaggggcccagggagggacac

SEQ ID NO: 244801 - RNA, 74 nt, Homo sapiens
aggaaacagcagaaaccggaaccacacacaccacaggaagccaggggaaagggaagaagacagcggcaccgaac

SEQ ID NO: 244802 - RNA, 75 nt, Homo sapiens
caaggcacaccaaagacccagagccgcgcaacgcgaccagcaggaggagccgaggaaggcgccaccacgaccgcc

SEQ ID NO: 244803 - RNA, 80 nt, Homo sapiens
gcccagggccggggggccgcggcacccgcgggccagaagccggggacgaggcaggccggaaggaccaggcagggagcagg

SEQ ID NO: 244804 - RNA, 74 nt, Homo sapiens
aggggccgacaaaagcgcagcaagacggccgcgcggcccgcaggccgcagaaagccgcaacaccgagaaaaaaa

SEQ ID NO: 244805 - RNA, 56 nt, Homo sapiens
ccaggagccgcaaagcaaaggcaagcggcaccacgacaaccccacaccaacgagag

SEQ ID NO: 244806 - RNA, 81 nt, Homo sapiens
cgcgcccgcgcggcgcggggaccgcggcccggagagaagagcggcccgcgccagggcggaggcgacacaacggcgcgccga

SEQ ID NO: 244807 - RNA, 69 nt, Homo sapiens
gcgggacagggcgggaggggacgaaggaagcaaggaaccggcagaagacagaccccgcggagacggcac

SEQ ID NO: 244808 - RNA, 75 nt, Homo sapiens
cccccccccaccccgcacccacgcccggcccggcccggccccgacacggacagcgacagcagacaagcaacacaa

SEQ ID NO: 244809 - RNA, 81 nt, Homo sapiens
gcagaggaccgacgaggcggaggagagaacgagaagcagggaaccgagcaagggggcgagaggggaacgccaccggaggga

SEQ ID NO: 244810 - RNA, 74 nt, Homo sapiens
acacacaagaccgcacgacaggcacagcagcaccccccacagcacggaaagaagaaaaaagcaggcacccgaaa

SEQ ID NO: 244811 - RNA, 64 nt, Homo sapiens
cgccaaccaaaccgaaagccagaaggcaccaagccacaaaacaggccagaccgggcacagacac

SEQ ID NO: 244812 - RNA, 78 nt, Homo sapiens
cccgggacgcccgcgcacccaccagaggaagacgacgggcagccccggaccggcccacggccccacggggcgacgagc

SEQ ID NO: 244813 - RNA, 80 nt, Homo sapiens
gcgcagcgggcaggggccaaagccacgaaccgggaacccacgggcaccggagacccagggggaaaccgaaaaacaaaaag

SEQ ID NO: 244814 - RNA, 74 nt, Homo sapiens
caaaaggcaccagcggagagaagaccccaggggcgacaggccgcagcacacaaaggcaaaggcccaagaacggg

SEQ ID NO: 244815 - RNA, 81 nt, Homo sapiens
ggagaggcgacggcccgcagccggaccccaccggacggcggggccacgggcgccgggaggagccaaagcgccaggagcaga

SEQ ID NO: 244816 - RNA, 82 nt, Homo sapiens
aaaccacggaaacaggcacggccacagaagcaacaaaggaccgcccccagagagagggcgggcccaaagggcccgaagcccc

SEQ ID NO: 244817 - RNA, 55 nt, Homo sapiens
gaagagagcccacagaggacgagaagaggagaacaacaaggagaacaaaaaaagc

SEQ ID NO: 244818 - RNA, 73 nt, Homo sapiens
acagacacaaaccgcggcgcgacggaccccacccaccagaacggggagccggagccgaagggagaccaccgac

SEQ ID NO: 244819 - RNA, 71 nt, Homo sapiens
cgggccaaaggacgaagaacccacagagcggagccccgggcccagcaggaggcggcccccgcggaccgccc

SEQ ID NO: 244820 - RNA, 83 nt, Homo sapiens; identical to SEQ ID NO: 214106

SEQ ID NO: 244821 - RNA, 76 nt, Homo sapiens
caaggcggaggagaagggacagcccgggcccggggaaggggccccgggccgaggaccgcggaccaaaggcacccag

SEQ ID NO: 244822 - RNA, 68 nt, Homo sapiens
gagagccacggaaacgaagacgagaacaagcgcgaacagcagcaggggaaagcgcgagcgagcacccg

SEQ ID NO: 244823 - RNA, 84 nt, Homo sapiens
acagacacgcgccggagagaaacagcgacaggacacaggagccaggcgagaaggacaggccccaaagcaaccggaaacagaagc

SEQ ID NO: 244824 - RNA, 64 nt, Homo sapiens
ggggagaagagcgaggaccaaaccgcccaaaacggaagaaggacaggccccaggggcgccacag

SEQ ID NO: 244825 - RNA, 80 nt, Homo sapiens
gaagaaacgggccgcgaaccgcagacagcggccaagaagacacaaaggacggaggcacgggacagcaacagaccagcgag

SEQ ID NO: 244826 - RNA, 108 nt, Homo sapiens
caggcccggagaagccgcggcggcagcacgacagcgccggcaacacgcggcacaagacgccagccgccgcagggaagacgccgggcccgcagccacggcccgggcggg

SEQ ID NO: 244827 - RNA, 77 nt, Homo sapiens
aaaggagagcacaaccacgcagggaagcccaggggcaggggagcgcagagagagaacgcaaacccgagaaaggagaa

SEQ ID NO: 244828 - RNA, 62 nt, Homo sapiens
gacgcggaaccgcacgcagagaaagagcggaagaaacccagacgccgacccacacaagcagg

SEQ ID NO: 244829 - RNA, 69 nt, Homo sapiens
acggaacaaaagacgggggaaagaagccaaaggaagagggaaaaaacgcgggacgggaacagaagaaca

SEQ ID NO: 244830 - RNA, 113 nt, Homo sapiens
gagcggggggcagcggacacggagacgggcccgacccccgacgccgaccggacagcggcacagaggagggagcgaaacgaagaaagaagcggcagaagaaagaccaacagaca

SEQ ID NO: 244831 - RNA, 76 nt, Homo sapiens
aacaacccgcgcccagcaccagcggcgcgcccaaaaggcagacgacaaggagcggaccccgggcacacaaaacagc

SEQ ID NO: 244832 - RNA, 82 nt, Homo sapiens
gcaaacaggacgggaagaacagaagccgagacccacagcggccccaggcggcacgacccagagcccgggacggggacggcgg

SEQ ID NO: 244833 - RNA, 79 nt, Homo sapiens
ggaaacgagcacgggcgaccaccgaagcaacaaggggaaggggcaaaagagcagaagcacccaagccagggagcggcaa

SEQ ID NO: 244834 - RNA, 79 nt, Homo sapiens
ggcacgcgggacgaacaccgcacaggcaggaggcaggccaaggacccgagcggggaccgagaaagacccccgaggaacc

SEQ ID NO: 244835 - RNA, 88 nt, Homo sapiens
aacccgcgaccaagcgaggcggacccgaagcggaccccgaggaagcagccaagaagagggaaagaagacaggaaacaagggaaggacg

SEQ ID NO: 244836 - RNA, 80 nt, Homo sapiens
acaacagcagccacaggaaccgagggagcagggcagcaccccccacgcgcgagaggcagaaaagcgaacagacgaaagga

SEQ ID NO: 244837 - RNA, 84 nt, Homo sapiens
gcggaggcggccaagaagaacaagcgaggcccgggggacaacggaaacaggcccggccaggccccaccgccacaagcaggggaa

SEQ ID NO: 244838 - RNA, 76 nt, Homo sapiens
ggcggaagacaggccacccagcggggagcacggcgagcagccaggccaggagagccacgccaaaaaaagggccgcg

SEQ ID NO: 244839 - RNA, 96 nt, Homo sapiens
ggagaacgaacagacaagcacgccggagggaagagcgagggagagggcggcgacggcggcgcgaggaccgaccgggcccgcggacgaagaaggcac

SEQ ID NO: 244840 - RNA, 74 nt, Homo sapiens
gaagcccagaccgcagggcgggaaaaaaccaagcagcgagcaccagccccaagcaaaaaagagcacgggacccc

SEQ ID NO: 244841 - RNA, 80 nt, Homo sapiens
ggcacaggcccaggaggacccgccggacaaacgcgacacgagaaaaacaagaacagaaaagcaagagggaagacaacggc

SEQ ID NO: 244842 - RNA, 90 nt, Homo sapiens
cgcgcgcgcccgggaggaaggaacgaggcaaggagcaaagcagcggcgcagcccggggccagacacaacaggccggggccccaggagggg

SEQ ID NO: 244843 - RNA, 41 nt, Homo sapiens
ccagccggggagccgagccagccacgcaacaacagccagac

SEQ ID NO: 244844 - RNA, 55 nt, Homo sapiens
aagacacagggaaccaccaggagacacgaaacgaacggaggcacggcaaagagac

SEQ ID NO: 244845 - RNA, 72 nt, Homo sapiens
gcaccgacagccggagacccagacggggagcggcccagagcggacacccccggaccgcgcgccgccagcgcc

SEQ ID NO: 244846 - RNA, 54 nt, Homo sapiens
gcagggcgccaaagcgagagagggaagcgcccggccgagaagacagaggagcca

SEQ ID NO: 244847 - RNA, 107 nt, Homo sapiens
acccagaacagcagcgacaggacagaaacagaagcggggaacaagaagcacccaggaccgggcaacccagaccagaagaaacagcagagcagaagaagcaaaagaaa

SEQ ID NO: 244848 - RNA, 80 nt, Homo sapiens
aaagggcagcagcagccagggggcaggacagggaggggcaaaaagcagagaaaaaacaacggagaagcaaaaccaaccca

SEQ ID NO: 244849 - RNA, 55 nt, Homo sapiens
gagaccacagaagagacgcaaggaaaaggcggacgcaaccgccaaacgaacagaa

SEQ ID NO: 244850 - RNA, 57 nt, Homo sapiens
caaaccagaaagcagggccgcaccccagggcagagaaagagcgagagggaaaggaag

SEQ ID NO: 244851 - RNA, 91 nt, Homo sapiens
ccgcgcgcgccagcaagaagaccgcgcccgagcccagaagaggcaacggacaaaagagaaacacaagggcagaggcacagaggaaagacca

SEQ ID NO: 244852 - RNA, 34 nt, Homo sapiens
aaggcgccgaagaggccgagaccgggaggaagcg

SEQ ID NO: 244853 - RNA, 80 nt, Homo sapiens
agaaggagcgcggaccggcagcgagcccaggcacaagggaggcgacagagacagcagcagcaacaacgaacgcacagacg

SEQ ID NO: 244854 - RNA, 75 nt, Homo sapiens
cagacacggggaagcgcaaaaacaagacggggcgccccacagaggggcgacgggcccgagggcaggacagcaggc

SEQ ID NO: 244855 - RNA, 51 nt, Homo sapiens
accaagaaccagaacgcccaacccgacaagagacgaacaccagaaaggggc

SEQ ID NO: 244856 - RNA, 53 nt, Homo sapiens
accccaccggaggcccgcggccagcaacccccagcgaaccccaagcccgacgg

SEQ ID NO: 244857 - RNA, 84 nt, Homo sapiens
ggcggcccacaccgagcccgcgcagccccggagcaaccgcagacgaaacggaggagcccaggaggaagaagaagcagccaaaga

SEQ ID NO: 244858 - RNA, 61 nt, Homo sapiens
gacgcgccccgcccccccgccggcccccccacgaagccagcgagaagaccgagaggccgcg

SEQ ID NO: 244859 - RNA, 82 nt, Homo sapiens
cgcccgcacgggcgcgccaagggcacagagggagagacagacgcgaagcaaagcgccacccagaagacgacagcccagcaac

SEQ ID NO: 244860 - RNA, 72 nt, Homo sapiens
cacggagcccgacaggccaaaccacccccacccagcccccaagagcgggacaagaaggagaccgcaggaaac

SEQ ID NO: 244861 - RNA, 125 nt, Homo sapiens
gagcaaagcaagccgaaaaaccgaaacaaaaaaagaacgcgcaggcaggaagaaaggggacacgccaagaccgaggaagggggccaggcgaccagaccggacccagcacacaagcacccacggcc

SEQ ID NO: 244862 - RNA, 79 nt, Homo sapiens
cccaagaggaacccggcagaaaacggacgcccacagaaggaagcacaaaaagggacagcgacggcgaagacaaacaccc

SEQ ID NO: 244863 - RNA, 60 nt, Homo sapiens
caggaaagcgccgcagagaggggagaggccccaggagcaggcccgggcaccccgcaggag

SEQ ID NO: 244864 - RNA, 76 nt, Homo sapiens
ccgaggccgccggagaggagggcccgcccgcgaaaccaagcaaggaacgaagaaaaacaacaggcccagcggacca

SEQ ID NO: 244865 - RNA, 47 nt, Homo sapiens
ggcaggcaacgggcagcgcggaaaaccagcaaaccccgcgcccaccg

SEQ ID NO: 244866 - RNA, 72 nt, Homo sapiens
ccccgcagagccccacaggagccccaggcgccccacgccaggccggacccagcagggcccccggaacaaacc

SEQ ID NO: 244867 - RNA, 73 nt, Homo sapiens
gacggaagcaaggaacaaaccgaagaacagcgggaaagaaggcaaaacacggcagccaggaagaaagggaccc

SEQ ID NO: 244868 - RNA, 69 nt, Homo sapiens
agaaggacggcgcccacccgccggagcagcccgaggccccagccagcgaacggaagagcgaaagagaga

SEQ ID NO: 244869 - RNA, 76 nt, Homo sapiens
cgaaccagaccaagcggggcaaggcgccaccggaagaaacgggaggggaggagccgggaaagacagcgccaagcca

SEQ ID NO: 244870 - RNA, 55 nt, Homo sapiens
caggagcccacccgcccgggccacccggaggacgggcgccggccgagcccgggaa

SEQ ID NO: 244871 - RNA, 88 nt, Homo sapiens
cgggaggccacagcagccagccggcccgaggacaccgacaccagcagaagggccccgcccagagcaccacccgagacacaggagccca

SEQ ID NO: 244872 - RNA, 86 nt, Homo sapiens
cgacccggggggagcgcggggcgacgcggcgcagggacccgggacagcggagagcccggccacccccagacgccgaggaaggagac

SEQ ID NO: 244873 - RNA, 87 nt, Homo sapiens
ggacggaagaaaaggcggccgagaccagcagcgagagcaaagaagacgaagagagaacagaaaggaaagagaacacacagaagccag

SEQ ID NO: 244874 - RNA, 89 nt, Homo sapiens
aagcgcagaaagcaggcgaacccgcggcgcaaaacgcccaagacacagccccagcagcccccagacccacagacacacccagggaaaac

SEQ ID NO: 244875 - RNA, 75 nt, Homo sapiens
gggaccacgacgaaaaggaggcaggagggccgagacagagcgccccaggcggggccgcgcagcgcgcggagaagg

SEQ ID NO: 244876 - RNA, 80 nt, Homo sapiens
cagaacgcgcgcaaccacaccgacaccgcgggggcagaaggcagcagaccccgaacccaaccggacacacacagaggcgg

SEQ ID NO: 244877 - RNA, 79 nt, Homo sapiens
caggacgaagaccagcgccagggaaagaagaaccagacgccgggcccccagcaggcagccccacggaggggaaaggcca

SEQ ID NO: 244878 - RNA, 70 nt, Homo sapiens
gcagccaagagccacacccacgagaaggaagaggacggaagcaaacacaacacggaggagcacgcccgga

SEQ ID NO: 244879 - RNA, 50 nt, Homo sapiens
gaagagggaggcgaaaggcagaacccaaagcaacaggagaaccgaaagca

SEQ ID NO: 244880 - RNA, 81 nt, Homo sapiens
acccggccggaggccgggcacccgagacacagaagaccaggaaaacagagagaaaaagaaccccaggaacaaaaacaaaga

SEQ ID NO: 244881 - RNA, 76 nt, Homo sapiens
caacgggaaaccaaggagccgagaaggaaacagaccagcggagccggaaccaagaacagaacaacgaaggaaaaca

SEQ ID NO: 244882 - RNA, 34 nt, Homo sapiens
gcaacaagagcggccccgggcgcgggagccagcc

SEQ ID NO: 244883 - RNA, 68 nt, Homo sapiens
agaccggcggaaaaaaggggaaggacaaacacgaaaaacaacacggaaccacaccacgacaagagcgc

SEQ ID NO: 244884 - RNA, 51 nt, Homo sapiens
aaggaacccgacaagagcgggaacagacggagccaccaccaccccgagaga

SEQ ID NO: 244885 - RNA, 53 nt, Homo sapiens
gcgagcagcgacaaaggcccgccagaaccgggccgaccacaacagcccaaaac

SEQ ID NO: 244886 - RNA, 81 nt, Homo sapiens
agcgcgcgggcacgccgcggccacgcgccgggacggcaaaacagaacagaaaggcggagaaaaaagagggggaaaagacca

SEQ ID NO: 244887 - RNA, 77 nt, Homo sapiens
gaaaagagcgagggcccgcccccgcaggaccagaaggcacacaccggaagagagacacagcagaaagacagaggaac

SEQ ID NO: 244888 - RNA, 43 nt, Homo sapiens
aaaagccaaccgagcaggccaaaccaagggagcgaggcggcca

SEQ ID NO: 244889 - RNA, 78 nt, Homo sapiens
ggcagccgcagacccaccccaggagaacagccgcccaccacagagccagccgccgcgccaagaaacgcgcggccgggc

SEQ ID NO: 244890 - RNA, 77 nt, Homo sapiens
gccaagaccgagcagcagccccacagaccaggcagccagggcaccagaaggaaaaccaaacagccccaaaggcagag

SEQ ID NO: 244891 - RNA, 66 nt, Homo sapiens
gcagagcagccccacgaagcagccagagcccggcaccacccacgagacgagacggagcgcagggcc

SEQ ID NO: 244892 - RNA, 65 nt, Homo sapiens
cggcaccacccagccaaggccaaggcacgagaacaagccacgcaggggcacgaagacaccagccc

SEQ ID NO: 244893 - RNA, 72 nt, Homo sapiens
agggaggaacggagccccgccagacgccccaaacaaacagacaaaccggcgaccacacacggggacgacggg

SEQ ID NO: 244894 - RNA, 77 nt, Homo sapiens
gacaacgagcaaggaaaccggacgggggaagccccgacaaaaaaaaagagaggagcaaggacagggcgcagcgggag

SEQ ID NO: 244895 - RNA, 80 nt, Homo sapiens
ggggacacacaccaaagaagaaaccaggaacgcggcagaacccgggacccggaccagggggaaaagggagcagccacccc

SEQ ID NO: 244896 - RNA, 80 nt, Homo sapiens
cacgggacagccagaacaagcgcagagaacagacagcagagacaagaaaagggaaaagacaaagaacagccaaagcaaca

SEQ ID NO: 244897 - RNA, 58 nt, Homo sapiens
cgaaggaacacgcagggccagacagcgcgggagccaggaaacgcagaccccccacgag

SEQ ID NO: 244898 - RNA, 73 nt, Homo sapiens
cgccgccgccccgccagcgccagacggacgaggcggcggagaacaagcggcaggagccggaccagaccgccgg

SEQ ID NO: 244899 - RNA, 59 nt, Homo sapiens
ccagcaaagcccaggaagccgccgaaccaggagaagaggagcggaggagccccaggaag

SEQ ID NO: 244900 - RNA, 86 nt, Homo sapiens
cagccgagcgcgccgagacccccagggcggccggaggaaaaggacacaccacaacccgcaacacaaaaaacggacggagcaaggag

SEQ ID NO: 244901 - RNA, 45 nt, Homo sapiens
agaagcgaaggccagggcaggagggccccagccccaccccagccc

SEQ ID NO: 244902 - RNA, 74 nt, Homo sapiens
acgacgaggagcagggccgacgcgcaggaccgcggcaagcgggagcggacccacccaagccaccgaacccggcc

SEQ ID NO: 244903 - RNA, 99 nt, Homo sapiens
gcaccaggcacgaacccgagaaaacaggcaacgcgaaaggaggcaagaagacaagccgagaccaccaggagcagagcggaggcaaccagccaaaacaac

SEQ ID NO: 244904 - RNA, 87 nt, Homo sapiens
gggaagagccgcggcgcagcggcggacccgggcagaagaggcgggagagcccgccgacagcgcgaggaacacagaccggaggagcag

SEQ ID NO: 244905 - RNA, 73 nt, Homo sapiens
agcgcaggaggaggcccagcacagacccccgccccaacaagaggccaacggccaagaccgcccggcagcgggg

SEQ ID NO: 244906 - RNA, 65 nt, Homo sapiens
gaaggaccaagaaccaggacaccccgaaacggaacagcccagcaacagagagacaaaacagcaga

SEQ ID NO: 244907 - RNA, 68 nt, Homo sapiens
cggagacaaagaggcgcgaaaccgaaggcggcaacacagaccccacagccccgcccacgacaccccgg

SEQ ID NO: 244908 - RNA, 72 nt, Homo sapiens
cggggaccagaggaacacggcagcacagcgccaaggggcaggggaggcaggaccaggccaagcaaaagggaa

SEQ ID NO: 244909 - RNA, 74 nt, Homo sapiens
gaccacggacggggggggccgcacagacccgaccgagcagcgcacacgagcacgcccagcccagcccgaagcca

SEQ ID NO: 244910 - RNA, 81 nt, Homo sapiens
aagaagcggaagagagggggcgcccagcgccaacaccaagagacccgcgaccggaccccacacgccagcccacgggagcag

SEQ ID NO: 244911 - RNA, 78 nt, Homo sapiens
gacacggggaagcgcaaaaacaagacggggcgccccacagaggggcgacgaacgggaggaccacagcgcacggcacag

SEQ ID NO: 244912 - RNA, 83 nt, Homo sapiens
gggaccaagcccaaagaggagaaagagccaaggggcggggaacagaccagggaaggggaggagaagagccgggaaaaacacag

SEQ ID NO: 244913 - RNA, 72 nt, Homo sapiens
gaccagaacccgccccaccccacaggacaaggagacggccacagaggggggggcagccagaagaaggaccgg

SEQ ID NO: 244914 - RNA, 87 nt, Homo sapiens
gggaccgcgcggacccggccgggagaagcagcagcgcaagaacaagaacccggagcgaaagccgggcggaacaggaggacggggagg

SEQ ID NO: 244915 - RNA, 54 nt, Homo sapiens
cgggacccgcaagaggcaccccagccacccggggagcgaggcggccagggcccc

SEQ ID NO: 244916 - RNA, 71 nt, Homo sapiens
gcagcagccagagcaacacccaggccaggccaccaccgccgcccgaccaggcccggcccgacgccgggcca

SEQ ID NO: 244917 - RNA, 78 nt, Homo sapiens
cagaggaaccgagaggaccgaaccgaccaggccacacacccacgggagagccacaggaaccaagaacagagaccagca

SEQ ID NO: 244918 - RNA, 74 nt, Homo sapiens
gacccaagccggccccggcccccgggggaggccggcggcgcgcaccagggccgccccccaccccagaggaaccg

SEQ ID NO: 244919 - RNA, 68 nt, Homo sapiens
gccaaagaagggagagagcaaaggaaggaaccgaagaaagaaaaacacggccaagggaaaaaagcagg

SEQ ID NO: 244920 - RNA, 40 nt, Homo sapiens
ccggcccaccccccgagccgacaggaaagggggaggaaaa

SEQ ID NO: 244921 - RNA, 75 nt, Homo sapiens
ggccgcccagccaagcggccaaacccacccggcccccggcgccgccagcgaggcacaggaagcccgggggaagac

SEQ ID NO: 244922 - RNA, 76 nt, Homo sapiens
aagacccgaacaaacagggagaaggagacgcagaccgaagcaaggagcagcccgggcccccgcggcgggccccccc

SEQ ID NO: 244923 - RNA, 89 nt, Homo sapiens
gaccggccgagaggaagacgagccgggaggaacggcccggaaacaggaggacgccacagcacagcaaagccacaacacccaggaggccc

SEQ ID NO: 244924 - RNA, 79 nt, Homo sapiens
gcacgaggcacccccggaccagaacggcacggccacgggcgggcaggcaagagcaccaggaggaggaggagacgaggaa

SEQ ID NO: 244925 - RNA, 83 nt, Homo sapiens
cacgagcgcccgaagagcaaaaccagcgggcggccgcgcccccaggacacaagagcgggaagcgagccgagagcggacgcagc

SEQ ID NO: 244926 - RNA, 81 nt, Homo sapiens
gcggcggcagcagcggcagcggcaagcaccgcagaaccagagaccacagaagaaggaagggccacccaggacaggggcacc

SEQ ID NO: 244927 - RNA, 61 nt, Homo sapiens
gcaacacggcacggggccgggccagcccagaacacccagccacccaccagcgacaaggcag

SEQ ID NO: 244928 - RNA, 89 nt, Homo sapiens
ggcggcgaacgcggagagcacgccagaaggcccgggcacgagaggaggcagagagccccgcgacgagagagacagagagaccacgccga

SEQ ID NO: 244929 - RNA, 81 nt, Homo sapiens
gcgcaaaaacaagacggggcgccccacagaggggcgacgccaaggccaccgagccacaagaccacagcaccgacccccgac

SEQ ID NO: 244930 - RNA, 46 nt, Homo sapiens
gaggcccaagacgcagggaagggcacacaaccaagcccgccaagaa

SEQ ID NO: 244931 - RNA, 59 nt, Homo sapiens
cgaaaacgaggaagaaggaccaaaacagcagccgaaaagagagcacaccacagcaaccc

SEQ ID NO: 244932 - RNA, 70 nt, Homo sapiens
cagaaagcaaaccagcaggcaccaaggaaagcagaagacaaagccagaacagaaccagccaagccccacc

SEQ ID NO: 244933 - RNA, 70 nt, Homo sapiens
aaacgaagaaagaacacaaaagcaacgagagccggaaacaaaaccacggagcgggggaaaaccagccccc

SEQ ID NO: 244934 - RNA, 61 nt, Homo sapiens
gggaacccggcaccgccccagaaagcaccgggaggaaagagagccacacgaagaacacggc

SEQ ID NO: 244935 - RNA, 69 nt, Homo sapiens
ccaggagcccgagagagaaggggagggaagccgggcgccaagagccagcccagccaggggggggggggg

SEQ ID NO: 244936 - RNA, 77 nt, Homo sapiens
gggaggcgccccccagccggaagggcagagaaggggcagaccaacaccacccagcaaaaaccccgacgaacgcgcca

SEQ ID NO: 244937 - RNA, 79 nt, Homo sapiens
aggaaaacaaacaaaaccaccagaccaaggccgagcccccgaaacaaccaaccagaaccaaaggacgcagacacaccaa

SEQ ID NO: 244938 - RNA, 80 nt, Homo sapiens
aaacgaacaaagagcggagacgcccaagacaaggaagggaaaagaaacgagagaccccgcaccaccgagacagccccccc

SEQ ID NO: 244939 - RNA, 59 nt, Homo sapiens
ccgcgccagcgacagcaagaccaaagagaacccgacagaagaaaagggggacccacaga

SEQ ID NO: 244940 - RNA, 52 nt, Homo sapiens
cagacacacaacccgacccgacgagaccgagcacacaaacccagccgccccg

SEQ ID NO: 244941 - RNA, 51 nt, Homo sapiens
accgcgacgcacaggacaccagaccaaggacagccagacaagaccccaacg

SEQ ID NO: 244942 - RNA, 75 nt, Homo sapiens
cgggagcccgaaaacgcgcccggcgagcgggaacccagcagacagggcccgcaagaagcccagcgcagcaagacc

SEQ ID NO: 244943 - RNA, 79 nt, Homo sapiens
ccggccccgagaggagcggggacaggggcagggaccgcaacaagacgggaacagcagacagccggccagaacacacaga

SEQ ID NO: 244944 - RNA, 57 nt, Homo sapiens
gaagagggaccacaaggcaccaagcggggggggcaccacaagccgaacagccagcca

SEQ ID NO: 244945 - RNA, 82 nt, Homo sapiens
agaaagagcaacagcagggcaacagccgaaaaggaagagcagccgaggagaggaaagcggcagcaaagagaccccgcgcacc

SEQ ID NO: 244946 - RNA, 60 nt, Homo sapiens
gggagacaggccacgaagcaggagccccaccagccccaggacggaaaaaaacagagccga

SEQ ID NO: 244947 - RNA, 64 nt, Homo sapiens
ggcccgaacagggacggggcgcccggccaccacacgccgcacccgcccagggacaaggaacaag

SEQ ID NO: 244948 - RNA, 52 nt, Homo sapiens
gagcaccgggagcggcgaagaggcaccggaggagggaaacccagacgacaag

SEQ ID NO: 244949 - RNA, 61 nt, Homo sapiens
gaaacacgagagagagccaacacacagcacaacagagaggccgagggcacagcggagcagg

SEQ ID NO: 244950 - RNA, 80 nt, Homo sapiens
ggaagcaggacgcgccgcgccccaagcaggggaaagcgcgagcgagcacccggagcagcagagcacccaacaggggacag

SEQ ID NO: 244951 - RNA, 71 nt, Homo sapiens
gggcagcgccgaagcaggagcgacaaacaacggggaggagggagaggcgacacaggagaggaggagaagaa

SEQ ID NO: 244952 - RNA, 74 nt, Homo sapiens
accgaagccgcgaggaaaggcacgaaggcaaaccgagacccaggcaaaggccgggacccaggcccagagcagag

SEQ ID NO: 244953 - RNA, 50 nt, Homo sapiens
gaagccgcaaaagaggggaccagcgcgcagggggacaaaggcccagagga

SEQ ID NO: 244954 - RNA, 71 nt, Homo sapiens
ggaaaaggagaggagaagagagaaaagaaaaagggggaacaacacagcgagcacgaggagaacaacagaac

SEQ ID NO: 244955 - RNA, 79 nt, Homo sapiens
gccgggccggcggacgcggcgccacgcagcagaacccaggagaaacgagagggacagcaaggaagacgccagagagcgg

SEQ ID NO: 244956 - RNA, 76 nt, Homo sapiens
cccgggagcagaagggaggcccaagacccacaacaaaaggacacggaggaccggagcagcagagacagcaagagcg

SEQ ID NO: 244957 - RNA, 73 nt, Homo sapiens
agggaccaagaggaaacgggcaagagcaacgaaccaaagcaaaggaggccgggggaagacggaaaagagagac

SEQ ID NO: 244958 - RNA, 83 nt, Homo sapiens
aggacggcggggcgcagcggacaccgggcaggggccgacggagcaagagcgaggaacagcggaacacggagcggccccgccgg

SEQ ID NO: 244959 - RNA, 87 nt, Homo sapiens
gcaggacgcacacgcgagggggcaccgggggcacgcgggccgaggacggaggccgaggaaggaggccgcgcacgggcacaaagaccc

SEQ ID NO: 244960 - RNA, 74 nt, Homo sapiens
cagcagccagagagccagacaggaagcacaagaagaaaagacacaggaaaagaggccacagaacaacacgaacg

SEQ ID NO: 244961 - RNA, 61 nt, Homo sapiens
agaggaacccgaagaagaaaggacgacagccagagagcagaacgagaaacgcgcagcccag

SEQ ID NO: 244962 - RNA, 76 nt, Homo sapiens
ccgggaaaaaaagagacaagaaaacagagccacaggaagaggacaaaggaaaagaaccaacagacggagcacggcg

SEQ ID NO: 244963 - RNA, 73 nt, Homo sapiens
acaagacgagcaaaaccaccaggcgcaggaccccaggcaccgggaaaacgcagaggaacgagggggagccacg

SEQ ID NO: 244964 - RNA, 80 nt, Homo sapiens
gcggggcgggaagcggggcggcgccggacgccggccccgcgggagcaccaaaacagaagggggggccacagaacacgcac

SEQ ID NO: 244965 - RNA, 72 nt, Homo sapiens
gaggcccaaagaggcgcaagagagaggagggggcaccgagcaacgagggcagaggccggaagagcgggagcg

SEQ ID NO: 244966 - RNA, 74 nt, Homo sapiens
ggcaccacggccgagcccgaggacgcacaaggaccggcacggcagaagccgccacgccgcaggcagaaaccacg

SEQ ID NO: 244967 - RNA, 79 nt, Homo sapiens
aacgcagggaaggaccagacggggacgcacacggaagaaacgcaacccacaggcaacaggaagaagaacccacaggggc

SEQ ID NO: 244968 - RNA, 71 nt, Homo sapiens
ggcggacaccccacacgccgccacccccaccggaggcccaaaaaaacagaccaccagccgcgaggacagga

SEQ ID NO: 244969 - RNA, 81 nt, Homo sapiens
ggacaccccggggcgggcaaggagcgaagcaacgggagagcaagaggaaggaagcaagaacccgaaaaaaagaagaacgaa

SEQ ID NO: 244970 - RNA, 70 nt, Homo sapiens
ccaagcccaagacaaaaacccagccagcaggcaacaggcccagaccaggcccaaagagcccaccaacagg

SEQ ID NO: 244971 - RNA, 79 nt, Homo sapiens
gccacagagagccagccccaaccgaacccagacgcagaaccccggggccgcgggcagcaggaagaccaacggggagccg

SEQ ID NO: 244972 - RNA, 78 nt, Homo sapiens
cacaacaagaaagcagaaacgaaagaaagcaagaggcaagaaggggaaaagggaagaggaaagaagaaaggcaaccaa

SEQ ID NO: 244973 - RNA, 67 nt, Homo sapiens
agccggcgccacaaaaaacccaaagaacaacggaaaagagccccaaaccgaggagacgccacgaagg

SEQ ID NO: 244974 - RNA, 81 nt, Homo sapiens
gaaggcacaccaggccccagcaagagacggcaagcaggaaacggaggacggggaaaaaggaccacaagccacgaagaagag

SEQ ID NO: 244975 - RNA, 80 nt, Homo sapiens
aggaccaccaagggcagcccgagaccaacgaagaagaagcgagcaaacgcaggagacgagccgccccgcacgccagcggg

SEQ ID NO: 244976 - RNA, 72 nt, Homo sapiens
ggcggcccgccccggacccgagcagagcaacgagggggaaccaagggcggacagcccaacgacaacaaagaa

SEQ ID NO: 244977 - RNA, 82 nt, Homo sapiens
acagcagccaggagcagagcgacagcggcgagcagaacacggcgagcggggcggagaacggaaaagcaccaggaagcagaga

SEQ ID NO: 244978 - RNA, 74 nt, Homo sapiens
caaagccaaggacgcgagagacaaacgaaagaccacacggaggaggcagagcccgcccagaacgaggacgcacc

SEQ ID NO: 244979 - RNA, 58 nt, Homo sapiens
gggcgggcaacacagcgcaaggcaacgcgagggccacgagggcgcaaaagaccaaccc

SEQ ID NO: 244980 - RNA, 71 nt, Homo sapiens
aagccgagcaccagagagaaaaggaccaccaccccaggcagaggcgaggcaccaccggcgagcaaccccac

SEQ ID NO: 244981 - RNA, 65 nt, Homo sapiens
ggacagaaagccaaaaaggagaaagagaaaggacagggacaggaaagaaagaaaaagaaaagaaa

SEQ ID NO: 244982 - RNA, 75 nt, Homo sapiens
agccggacccggcagaaccggaagagaccagccagccgcgagggcccagggaccacagcccgacagagaaaggca

SEQ ID NO: 244983 - RNA, 76 nt, Homo sapiens
gcgccaagcaacagccaaccgggaaaaaccaaacggcaaagcacgccagacggagaccggacggaaggacagaacg

SEQ ID NO: 244984 - RNA, 91 nt, Homo sapiens
gaccaacaggggcaagacaagccagaacgagaagcgcaccacagagaaggagacgccgagagcagaaacccggacgacggagaacccgcga

SEQ ID NO: 244985 - RNA, 76 nt, Homo sapiens
gcccacccgggcgagaagacagccccaagagggacgcggagcggcgggccacagacgcggagcgcacacacgggac

SEQ ID NO: 244986 - RNA, 83 nt, Homo sapiens
cagagggcaggcagaagccaggggcacagccagcccagacaggggccagaccaacccggaaggccccagccaggacagcccag

SEQ ID NO: 244987 - RNA, 78 nt, Homo sapiens
ggaggccccccagccagggaacgcgcagagggcaaggggggagagggcagaaaccagcagcgcaacaagaaggcacag

SEQ ID NO: 244988 - RNA, 48 nt, Homo sapiens
ccgcccaccaccagaagcaccagcacaccagaaccgaagccaccgaga

SEQ ID NO: 244989 - RNA, 63 nt, Homo sapiens
gccggccagggaccagcggaacggacaggcgaaagacaagaaaaccccaggacacagagcggg

SEQ ID NO: 244990 - RNA, 76 nt, Homo sapiens
agggaagaaaacgaaaaggaacgaagaaaaagcaaaaggcggccgaaaaagacagagagagcaaaacgacgaagga

SEQ ID NO: 244991 - RNA, 80 nt, Homo sapiens
gcaagccggaggagaagcaagaaggcccggacacagcaaaccgggccacaggggacacacccagaagggcagaaaagaaa

SEQ ID NO: 244992 - RNA, 73 nt, Homo sapiens
cggggagcgcccgcgacagaggagggaggaaaacaaccgagggcagagcgcaggggcccaggacaaagggacg

SEQ ID NO: 244993 - RNA, 80 nt, Homo sapiens
gacacgcgcccgagccaaggagaggggcggcccagcacaggaggccgaagggagaacgaagcgcaccgggggggacccca

SEQ ID NO: 244994 - RNA, 78 nt, Homo sapiens
cgacggcagacacggcgcagccggcaaaaacacggagaaccacggggaccaagaagcgagcagcccaaacggacccgg

SEQ ID NO: 244995 - RNA, 80 nt, Homo sapiens
agcacccggaccacggggacagcgaacagcggcagcgaaacagaacagaaggcccagcagcagacaacagcagcaacagc

SEQ ID NO: 244996 - RNA, 35 nt, Homo sapiens
ggcaaccaccccgcgagaaaagaacacggaaagga

SEQ ID NO: 244997 - RNA, 68 nt, Homo sapiens
gacagcgcacaacggacccaaagacaggaccacgcaccagcagagaaggaaagcaaaccgaagcaggc

SEQ ID NO: 244998 - RNA, 79 nt, Homo sapiens
caggagagaagaccagaagggaggagagaagagccaggaccacggagcaggacccaaccggaaaccgcagaccagcgag

SEQ ID NO: 244999 - RNA, 63 nt, Homo sapiens
aaccgaggcagacggagcggacggaaagaaaaccagaaggcaccgacaggaaaggaaaaggag

SEQ ID NO: 245000 - RNA, 80 nt, Homo sapiens
cggaagcggcagcggggaggacaggaaccgcggggccgaagcacacgccaacgccgggggagaacgcgccgcacacgcaa

SEQ ID NO: 245001 - RNA, 73 nt, Homo sapiens
cgccgcagagcggcaccgaaggacaggaggagcagccgcaacagcgcaccgacacaagcccagaagccccacc

SEQ ID NO: 245002 - RNA, 77 nt, Homo sapiens
agaacgaacagaaagagaagcggcaggccagacggcacccgacagaagcagcaccaaacaacgcaagggaggggcag

SEQ ID NO: 245003 - RNA, 53 nt, Homo sapiens
aacagcagagcaaggaaagccagacaccaggaagacggcaccggagcacccca

SEQ ID NO: 245004 - RNA, 56 nt, Homo sapiens
cccagcgggccggacggggcggggggaacggaaagaaggggagccagagagcggcc

SEQ ID NO: 245005 - RNA, 57 nt, Homo sapiens
aggccggagccccacggcacggcacgcagagggcggacgagagccaccagaccggcg

SEQ ID NO: 245006 - RNA, 79 nt, Homo sapiens
gcgaaggagaacggagaggaagaacgagccgcacagagcgagaagaggcgacaccagggcccaaagaacaaccgaaagg

SEQ ID NO: 245007 - RNA, 79 nt, Homo sapiens
caagcaagccagcggggaccgccagcgaccggaggccaaggcgagaaggagggacaagaaggaaagaaagaagaccacg

SEQ ID NO: 245008 - RNA, 76 nt, Homo sapiens
gcaagacggcaccaggggcaggccagcacccgagccgagccccagcgcagggacagccgccggggggggaaaaagg

SEQ ID NO: 245009 - RNA, 81 nt, Homo sapiens
gcagcgccgcgcagccaagcagcaggaagagcgccgaagggaaggccaggaccacaccccacagccaccgccccgcgcggc

SEQ ID NO: 245010 - RNA, 68 nt, Homo sapiens
ccgcccggggccgggcagcgagcccacacaggggaggcaagcaggggggcaaaggaaagaaggcagaa

SEQ ID NO: 245011 - RNA, 71 nt, Homo sapiens
aggaggacgcacgccacggccacacaacacaacgccagggggaaacagcagcacagacagacaagaggcag

SEQ ID NO: 245012 - RNA, 74 nt, Homo sapiens
cccgacgggaacccgccccgcccgaaaggaccccaacgcccgccgccggggcgacagagcgaaagaaacgagcc

SEQ ID NO: 245013 - RNA, 49 nt, Homo sapiens
aaccgcccacaccggcccaacaagaaacacacagaaaccagacacaggg

SEQ ID NO: 245014 - RNA, 87 nt, Homo sapiens
gacagcacacgaaggggggaggaaggcccagaagcggccaggaccgcccggccacgcggagagggaccaaccacaaaccgagacagg

SEQ ID NO: 245015 - RNA, 79 nt, Homo sapiens
ggaacgccagccagagaccacaccccggaaacggacaacaggaaaggaaaggcaggagagcgaaagagagcggaaaaac

SEQ ID NO: 245016 - RNA, 75 nt, Homo sapiens
aacaaaacacaaacagggaacacacagacagagacccccggaaaagccagggcggaaaccggcaagaggaagaga

SEQ ID NO: 245017 - RNA, 67 nt, Homo sapiens
agccggaaccgaggaaaacagggcgaagagagaacacgcacggaaggaaggagaccacgagaaagaa

SEQ ID NO: 245018 - RNA, 75 nt, Homo sapiens
cagcccgccgcgagaccgcacagaaaagccacagcgaaacgacaaaggagaaagacagcaaagaaaaggagaaga

SEQ ID NO: 245019 - RNA, 74 nt, Homo sapiens
aaaacccagccccagcacggaggagaggaggagaggcaacacgcgggcagccggcaggcgcggacagaaacaga

SEQ ID NO: 245020 - RNA, 87 nt, Homo sapiens
ccccagccccggcgcagacaggacccccgcgagccaccagaacgagacagcccccaaagcccgggaccgggagcccgggaccgggag

SEQ ID NO: 245021 - RNA, 81 nt, Homo sapiens
gaagaccaccacaacaagagacaacaccgcgcggaccacaaaccgcgccagaaaacgaccacagaaagacaacggaggcca

SEQ ID NO: 245022 - RNA, 78 nt, Homo sapiens
aagcagccaccagcagcccccagagcgggaccacagaggggggcggcagcggaagacaaaccacaacaacacagcaga

SEQ ID NO: 245023 - RNA, 81 nt, Homo sapiens
gggccccgggaacccagccgcgccaccacgcacgcacacgccggcgcgcgaccgcgcaaaacgaaccacagaaaaccaaga

SEQ ID NO: 245024 - RNA, 72 nt, Homo sapiens
ggcagaagggcaaagacgagaggcgaagcaaggaccccagaaccgggacaacccagcaaacaggccagaccc

SEQ ID NO: 245025 - RNA, 83 nt, Homo sapiens
cggcgagccgcggcacaccaaggagacggaagagcaagaccacaccagcacaaacggagaggcgcaggcacagaggagcccgg

SEQ ID NO: 245026 - RNA, 72 nt, Homo sapiens
ccgaaagcagagacagcagggagcagcaccaacacacagcgagacggcagggagaccaaggccgccaaagca

SEQ ID NO: 245027 - RNA, 74 nt, Homo sapiens
gcgcgcacgccaccgacgccagcggagaggagcgggaggaccccgccaggagcagccgaaggagaaagaagcac

SEQ ID NO: 245028 - RNA, 69 nt, Homo sapiens
gagcaaaagaaagggcacacaccagaccacagaagaaagggccggaagaacggagcggggagagccgcg

SEQ ID NO: 245029 - RNA, 85 nt, Homo sapiens
cgggcagcgccgacaccccagccggcgacacagcaccgaggagcaacacccccagggagcccagaccgacaggacgcaagggggc

SEQ ID NO: 245030 - RNA, 77 nt, Homo sapiens
cgccacccagagcgcacggcgacgccccaggggaaaacccccgggaccaggccgaagggcaagagggcacagaagac

SEQ ID NO: 245031 - RNA, 75 nt, Homo sapiens
agaagacccaaaagccaaagaggacagaccccaggaccaagacccgcaaccaggacacagcagaagcagaagagg

SEQ ID NO: 245032 - RNA, 69 nt, Homo sapiens
gaacacagaacccaagaaggagcagggaggcccccaggggagacgcgcccaaagcagcgccacagacca

SEQ ID NO: 245033 - RNA, 62 nt, Homo sapiens
aaaccagaaagagaacgggacaacaaaagagccacccaagggggaagcagaccaagaagaca

SEQ ID NO: 245034 - RNA, 79 nt, Homo sapiens
gcggagggacgcacccccacagggcagaaggagcgaagcaacgggagagcaagaggaaggaagcaagaacccgaaaaaa

SEQ ID NO: 245035 - RNA, 74 nt, Homo sapiens
ggaagcagcacgggcagcaaggacagagcaggcacagccacccagcagagagaagaacgagagccaaaggaccg

SEQ ID NO: 245036 - RNA, 58 nt, Homo sapiens
gcaacagcagcgcgagcagcaccggaaacggaaaaacacgcacaggcagacgaagagg

SEQ ID NO: 245037 - RNA, 85 nt, Homo sapiens
ccagaacgagacagcccccaaagcgccagccgcagccggcggacgcacccaccagcaagggacaagacccgcaccgcagcaagaa

SEQ ID NO: 245038 - RNA, 71 nt, Homo sapiens
caccagaggagggaaaaggcgagaagcaagacaacacgcggggccgggagacagagaaacacgaaagcagg

SEQ ID NO: 245039 - RNA, 78 nt, Homo sapiens
ggaagccacaaagcaaaacggcacgggagaggcgagagccacagaaggaggaggggacagcagcaggagcccagcaaa

SEQ ID NO: 245040 - RNA, 80 nt, Homo sapiens
ccaagccacacaggaggaaccccgagcagacagggaaggagacacggcgagcagacagaaaccgagaccccagaggagaa

SEQ ID NO: 245041 - RNA, 81 nt, Homo sapiens
ccggaacagcaggaaaaaaggacaaaaggcgaagggaaaaagaaagcgcgcggggggaccacagagagacgggggcaccag

SEQ ID NO: 245042 - RNA, 79 nt, Homo sapiens
ggccgaaccaccaacaccgcagcagcaaccgggcccggccaggcggcgccggaggaacgaacagcaacccgccaggacc

SEQ ID NO: 245043 - RNA, 58 nt, Homo sapiens
caaaggcaccaggccaccacagaaacaaaagcaacaaagaggagcgcacaaaaggagc

SEQ ID NO: 245044 - RNA, 74 nt, Homo sapiens
caccacgggccacggccacccaagcccagggcggaacgggccccgaacgaaaaggccggagacagaaagaaacc

SEQ ID NO: 245045 - RNA, 78 nt, Homo sapiens
gcggaacaagcggccgggaaagaacggaagaaggaagcgccaagacaggaaccaccaaaacaggacgaggacccggcc

SEQ ID NO: 245046 - RNA, 70 nt, Homo sapiens
gcgaagaacccccaaacgacccaggggaggcagagaggcggaccccgcgggcgcgcggcccgaacccagc

SEQ ID NO: 245047 - RNA, 74 nt, Homo sapiens
agccacagaaaaggcaagggcagaggcaacagaacaacaggaacagcacaggagggagcaggaaaaaggcggag

SEQ ID NO: 245048 - RNA, 72 nt, Homo sapiens
agaagacccaaaaaaaagaggagcagcaggcacagcacgggcagagccaggaacgcgaggccggcgcgccac

SEQ ID NO: 245049 - RNA, 65 nt, Homo sapiens
ccggaggaggggcccccgggacagaccccaccggcgggcaccccgcgaagcccccccccgcagaa

SEQ ID NO: 245050 - RNA, 127 nt, Homo sapiens
acagagcggggcagaagagacgaagacagacacacaagaggacagggagaaagggccccaagagcgggaagggcacgaacggccgaggcccacggggcacgaggccccagaccgagacccgcgggcc

SEQ ID NO: 245051 - RNA, 80 nt, Homo sapiens
gcggccaaagccgcccagacggccaccggcgggaggaacaaaagagcagccccgcgagccgcccagggggagggcagaca

SEQ ID NO: 245052 - RNA, 75 nt, Homo sapiens
accggagagccccgggagggaagacagggcccacccaagggccagagaccgcaaaaccacacaccgcacacagga

SEQ ID NO: 245053 - RNA, 74 nt, Homo sapiens
ccgggacccagccaggcagaccccgggcagcaggcacccagccaccaggcaacccacgaagaaggcgagaaaga

SEQ ID NO: 245054 - RNA, 79 nt, Homo sapiens
gacaacaacgaaaccggaggcgcacgaaaagaccgggcccccagcagccaagggccgcgagcccgggaggccacagaaa

SEQ ID NO: 245055 - RNA, 78 nt, Homo sapiens
gaacggcgaagaggcaccaaaaagaaccgcagacaggcagcaaccagagcgaaagaggccagaagaaaaccggggacg

SEQ ID NO: 245056 - RNA, 74 nt, Homo sapiens
ggagcgaggaaccagaacgaaaagcgccagaaagaaccgagggaaacgacaagaagcagcagcgccgacgaaaa

SEQ ID NO: 245057 - RNA, 57 nt, Homo sapiens
ggaccgagagcgcgaaacgcacgagaaggacaaaccggcgaccacacacggggacga

SEQ ID NO: 245058 - RNA, 83 nt, Homo sapiens
cacaggaacccaacgagccaaaggagcaagcccaggagaaacgggcaagagcacaaaagacagcaaagggaaccgccaagaag

SEQ ID NO: 245059 - RNA, 71 nt, Homo sapiens
gagggacgccggccccaggcaggcgccaagcggcgccagggcccccaaggaagacagcacgagggaacaga

SEQ ID NO: 245060 - RNA, 73 nt, Homo sapiens
ggccacggggccggccagcggccagccggcgcggggccacggccgcaggggaggagccccaccacagagccaa

SEQ ID NO: 245061 - RNA, 78 nt, Homo sapiens
gggcgacacgcgggcgcggcacccggcaaaggaagaaacacacaagaagggacgggcagaagggacaaggcccccgga

SEQ ID NO: 245062 - RNA, 87 nt, Homo sapiens
ggaaccccccgggcgcccggagaccgcggcaggggcggaacgcaggaacgcgaacaacgcagcaggcgcaggggagcgcgaggagcg

SEQ ID NO: 245063 - RNA, 88 nt, Homo sapiens
ggagacgagaagaacgacgccagaccagggggaggccacaagcaggaaagaaaaggccaagcagaggccccggcccgaacacgggaga

SEQ ID NO: 245064 - RNA, 57 nt, Homo sapiens
ggcgcccgcgcacgcgcaagaccgcgaggcgagacccaggcgaggggacggcgggga

SEQ ID NO: 245065 - RNA, 76 nt, Homo sapiens
cgaaaaggggcggaagaaaaacaaacacacgcaaaggagaaaggaaccgacagacgggaaacacgaccgccgcggg

SEQ ID NO: 245066 - RNA, 67 nt, Homo sapiens
agaccgcaacaaagaccgaaccggcccagcccggcaggacagcccggccgccgcccgccggaccagc

SEQ ID NO: 245067 - RNA, 53 nt, Homo sapiens
gccgggagggaccgcccagaccggagcccagcccgagagccagggacagagcg

SEQ ID NO: 245068 - RNA, 82 nt, Homo sapiens
aaaaggaagcacaccaaggacagcaagagcagccccggaacggaggaagggagccggagagaaaaagggcggagagaaggag

SEQ ID NO: 245069 - RNA, 44 nt, Homo sapiens
gagaagcaggagcccaccggcaggcgaggaccggcccagccagg

SEQ ID NO: 245070 - RNA, 74 nt, Homo sapiens
ccgcagaaggccggagacaccagcagcaacccaaggagacggcgcgggggcggagagggaaagagagcccagca

SEQ ID NO: 245071 - RNA, 67 nt, Homo sapiens
ggggcaggagaaagagagaacaggggggagaagggaccaggaagacacgggggcaggcagagaaggc

SEQ ID NO: 245072 - RNA, 77 nt, Homo sapiens
acagaacacagaggaaaaccacaaaaaaccaaaacagcacaacgacgagaacaaagcagcaaacaccagaaagaaac

SEQ ID NO: 245073 - RNA, 63 nt, Homo sapiens
ggggcagccgcccaggagggcggagccccgggcccagcaggaggcggcccccgcggaccgccc

SEQ ID NO: 245074 - RNA, 69 nt, Homo sapiens
gaggaggaagaagaaggaagccaaagaaggcagagaccgagcccagcggacccaaaggacccccgcgag

SEQ ID NO: 245075 - RNA, 56 nt, Homo sapiens
ccggcccggcccgacaccgcgggccgccagacgggaaggggccaggccgagggccc

SEQ ID NO: 245076 - RNA, 81 nt, Homo sapiens
cagagccgggagcaagaagaacacccagagacagaacaaaggagaccaagaaaacgaaaaaggaaggaaaaccacaaaaca

SEQ ID NO: 245077 - RNA, 74 nt, Homo sapiens
cgagagcccgcgaaggccggggggggcacagagccccggaagacagcccccagcgaccagacccagggccagag

SEQ ID NO: 245078 - RNA, 53 nt, Homo sapiens
gaaccaagaccccaaagggaaacgaaagcaccgggaggaaagagagccacacg

SEQ ID NO: 245079 - RNA, 69 nt, Homo sapiens
aagggaccaaccgagaaagggcggggaggggacgaaccaggcagcccaaaacaacccagaaaagaaaag

SEQ ID NO: 245080 - RNA, 81 nt, Homo sapiens
caaagggaaacagccagaacggaaaccacggacaaacaccccaaggagggccgcaagaacgagagcgcgccaagggaaagc

SEQ ID NO: 245081 - RNA, 70 nt, Homo sapiens
agggccacaggcccacagacgggaggcgagcccccgccccgggaaagcggcgcagcccagaggagagagg

SEQ ID NO: 245082 - RNA, 78 nt, Homo sapiens
ccaggaagagagacgacgggaaacagacagcccgagaaaggaggagaaacaagcagcaccgcaggaggcagcagcaag

SEQ ID NO: 245083 - RNA, 86 nt, Homo sapiens
cgacgcgcaagggcgcggagccgcgggccggcgagcgcgcgccaccaggaccaccagggccaggggccggaggcagcggcaggcac

SEQ ID NO: 245084 - RNA, 75 nt, Homo sapiens
ccagggcagacaccccacccagaacaacacaagggcagaaggccaaagcgaaaagggaaagaggcaggaagcgag

SEQ ID NO: 245085 - RNA, 83 nt, Homo sapiens
aagcaccaggcggagggcggcagcccagacgggcgggcagggccgggcccgcaggcccacacggagggaggcccaggcagggg

SEQ ID NO: 245086 - RNA, 68 nt, Homo sapiens
accgcccgaaccagagccggaggcgggaggacgggcgccgcagagcccgcgccgcaccaacgggaagg

SEQ ID NO: 245087 - RNA, 70 nt, Homo sapiens
cggacccacgggaacagagacagagccccagcagagacgaaaaaaccggaaaaacagagaagagacgaag

SEQ ID NO: 245088 - RNA, 83 nt, Homo sapiens
gcaacgggacgcggggaacccggaagaccgacgggcaggaaagagaagccaccgcgaagcggggcaccggcacacacacacga

SEQ ID NO: 245089 - RNA, 74 nt, Homo sapiens
cacgcagacgaggaacagggggccagcgagggccgcagaaaaggaagaggaggagagaagagaggaagcgagca

SEQ ID NO: 245090 - RNA, 75 nt, Homo sapiens
agaaagggcagacacaggcacaccaaggggaagaaggggagacaagcggagcccggcagggaaaccaggaagggg

SEQ ID NO: 245091 - RNA, 74 nt, Homo sapiens
cacgcagaacccgggagaggagaccagaacgaacccccccccccggcgccaccagcaaaaccagagaaacaggc

SEQ ID NO: 245092 - RNA, 70 nt, Homo sapiens
gcacgcggaagcgccagggccccaacccgaaagcagccgaacacccagacaacaccaacaggcagcccaa

SEQ ID NO: 245093 - RNA, 53 nt, Homo sapiens
gggagcccgggggaccacaggcgaggaaaggagaaaccgaaacgaacccagcc

SEQ ID NO: 245094 - RNA, 64 nt, Homo sapiens
aagacggacgaaagccagagaaaaagcggagaaaaggcacggcaccaccacccacgcggcccgg

SEQ ID NO: 245095 - RNA, 81 nt, Homo sapiens
ggacggaccgagaccggaccgagagcggaccgagagcgcgaaacgcacgagaaggccagaacaggacgagcagaacaggcg

SEQ ID NO: 245096 - RNA, 62 nt, Homo sapiens
ccaccacagacccagacaggcacggaaagcaggggaagacaaccggacccagaaccagacac

SEQ ID NO: 245097 - RNA, 83 nt, Homo sapiens
ccagcgcccagggggggaaaccaccgagccaggacaaaaccaggcagaaccaacacgaacccaagcacaaacaagaaaacgag

SEQ ID NO: 245098 - RNA, 75 nt, Homo sapiens
cggcccggaccgcaggacgggagacaagcaagagccaggacaccccgaaagccggaaaacgaaaacaagccgaca

SEQ ID NO: 245099 - RNA, 73 nt, Homo sapiens
acgcaggccccgccaccccccaccggggacaggcagaaaaaaccccaaacacccagagcaaaagaaaccaaga

SEQ ID NO: 245100 - RNA, 88 nt, Homo sapiens
caagcaagagcgacgcaagaggcagccaccacgggccggggcgcacccacgacgcgcacaccaccggcagaccggcgccacagcacca

SEQ ID NO: 245101 - RNA, 69 nt, Homo sapiens
gagagagccccaaggaccacggcaaaccaggagcgacgccccacccacagagagaaaacgccccgaaag

SEQ ID NO: 245102 - RNA, 64 nt, Homo sapiens
aggccggggaccgccaaccccccaagaagcagagaccagaaggaaaacacaccaggcacagaaa

SEQ ID NO: 245103 - RNA, 83 nt, Homo sapiens
cggagaggggccggcgccggcacaagcagagcaggccgcggaccaacccccagaccggcagcacaccacggaagcaacacacg

SEQ ID NO: 245104 - RNA, 71 nt, Homo sapiens
gcgaggagcaaccgccaaccagaccaacaccggggggcgccagagaccaggggcaggagagagccaaaacg

SEQ ID NO: 245105 - RNA, 78 nt, Homo sapiens
gcggaggcgacaaccggcaccgcggggccgggggcccgccccggaacccggagcccgcggcccgaaccgagcggacca

SEQ ID NO: 245106 - RNA, 70 nt, Homo sapiens
aagaagacaggaaaaaaaaaacaccgaggcgagcaagacgcccagccccaccacgaaaaacccacgaggg

SEQ ID NO: 245107 - RNA, 61 nt, Homo sapiens
gcccgccggcggcggcggggcacagaacggcacccacgaacccgccgagagagaagcaaaa

SEQ ID NO: 245108 - RNA, 50 nt, Homo sapiens
ccgaagacaccccccccccggaccagaggagaaaggaggacccgggaaga

SEQ ID NO: 245109 - RNA, 70 nt, Homo sapiens
gagacccacacgccagacagcaaagcaagccaagagggcccagccaagaagcacggcaagagcagaaacg

SEQ ID NO: 245110 - RNA, 84 nt, Homo sapiens
cgccgagcgccggcgagcccgcaaaagcagaccagaggaggccccccagccaccagaaccacaccaaaaaaggagaccacacag

SEQ ID NO: 245111 - RNA, 74 nt, Homo sapiens
cccccagaggagcggaaccgacagcacgagcgacggccgcaaagacggaggcaagcgccaggaccgcggggggc

SEQ ID NO: 245112 - RNA, 78 nt, Homo sapiens
gaaagggcccccccgacaaccccgcacgcaagcggaaaccaggaaccgacagaagccaggaccccagagagggccaag

SEQ ID NO: 245113 - RNA, 77 nt, Homo sapiens
agcaaggagaggcccagcaaacaaaggcaggaagagaaaaggcaccccaaggaggacaagcccaaagccccaaccca

SEQ ID NO: 245114 - RNA, 41 nt, Homo sapiens
accagcggcggggagccaagcaccggaggggccaggaaaag

SEQ ID NO: 245115 - RNA, 87 nt, Homo sapiens
ccagacggccaccggcgggaggaacaaaagacccgaagagggggaaaacgcagggaagagaggacagcaggagggcggagacaacag

SEQ ID NO: 245116 - RNA, 76 nt, Homo sapiens
gcgacaccggaagaggaagcggaaaagagcaaacggggcaaggccaagaacccggcagaacaaccaaaaagaacga

SEQ ID NO: 245117 - RNA, 79 nt, Homo sapiens
cacaccagccacgaaccgaccaggggcacggggccgggggaagaaccggcccgggaggaggccggcgcccagcagaacc

SEQ ID NO: 245118 - RNA, 56 nt, Homo sapiens
cccaaaggccagagcacagcgccaaagcagaaacaacgaagcaagcccaagggcgc

SEQ ID NO: 245119 - RNA, 75 nt, Homo sapiens
cacaagaccaaaggaacgggcacaaccacggggcagggaagacagaaggaagcaaagacagagcaaaaggagcgg

SEQ ID NO: 245120 - RNA, 39 nt, Homo sapiens
ccgcgaggacaaggcaagcagggcgccggccgggcggag

SEQ ID NO: 245121 - RNA, 79 nt, Homo sapiens
aaaggcggaccggcgaacgaaggggcggccccggcgaggcaggaggacagggccagcggcagcgagggcaccaaccaga

SEQ ID NO: 245122 - RNA, 73 nt, Homo sapiens
gaagcccgcagacagacccacaaaccccgaaaaacgggaacaggacggcccaagacgggcaacgcacccgccc

SEQ ID NO: 245123 - RNA, 54 nt, Homo sapiens
agagaagacgcaacagcccacagaggcaccaaaccagcagcagcagaagggccg

SEQ ID NO: 245124 - RNA, 95 nt, Homo sapiens
cgaggccggaaaccggcggcgccagccaccggagcaaccacaacccgcagaaagaacacagagaaggaaacgacggaaggagcagaccccccagg

SEQ ID NO: 245125 - RNA, 81 nt, Homo sapiens
gaagagcgacaagccgcggcagccgcggaccaccgccgccaggcagaaagagaaggcagaacagaggaagaccagaaaccc

SEQ ID NO: 245126 - RNA, 75 nt, Homo sapiens
gaaagaaagaaagaaggccgggagaagcaagaaccggcggggccggggagcccgggccagaccccccagacccag

SEQ ID NO: 245127 - RNA, 42 nt, Homo sapiens
gggcacccgcacggccggcccgggcacaaggcaaagaagggc

SEQ ID NO: 245128 - RNA, 74 nt, Homo sapiens
ccaggacgcgcccccgggagcgggcgcccagagcacgagagaaacagaggacgaccgggaggacaagaagagga

SEQ ID NO: 245129 - RNA, 89 nt, Homo sapiens
acgccgccccgccccggaaggaccgcgcgcgggcggagccggaaccaaaaagaagccccagagccggggccaggagccccaagcgcccc

SEQ ID NO: 245130 - RNA, 82 nt, Homo sapiens
gcgaaagcacacagaggagaacagcgggccgaacgaacgaagagagaagggagacagcgaccagacagagaggaggagaacc

SEQ ID NO: 245131 - RNA, 77 nt, Homo sapiens
ccgcacgccaacaagggccgccgcgagcgccggagcagcccagaaccaggagcagaaccaccggcagaaaagagacg

SEQ ID NO: 245132 - RNA, 82 nt, Homo sapiens
gccggcaccacgcggcacgcgaccaaggagggcaaagcgccgcggcaccgacgagagggcgcaccgcgccggagcccgaccg

SEQ ID NO: 245133 - RNA, 76 nt, Homo sapiens
cagcgcgagccaggacccgaaagccacacacgaggaggggcacggaagcaaaagccacgcccagaacccaggcgga

SEQ ID NO: 245134 - RNA, 40 nt, Homo sapiens
ccaagagccggcggcagacgagcggaggcagggcggaccg

SEQ ID NO: 245135 - RNA, 71 nt, Homo sapiens
ggacaggggggagaagaaagagccaaacaacgccacagaacacccagccacccaccagcgacaaggcaggg

SEQ ID NO: 245136 - RNA, 89 nt, Homo sapiens
ggagcccggagcccaggcccggccacaggcccgcccaggaacacgagcccaaagagggcaacacacaagcccaacaacaaggccaggca

SEQ ID NO: 245137 - RNA, 76 nt, Homo sapiens
gaacaccagcgcaaaggggaggacagacaaacagaacgagagccacagagaccgcacccgagcaggagggggagcc

SEQ ID NO: 245138 - RNA, 59 nt, Homo sapiens
gaccgcagaaagacgaaggcgaacaggaacaaagagagagaagacacaaaagccaggaa

SEQ ID NO: 245139 - RNA, 72 nt, Homo sapiens
caccgaacagaggagcgagaaagccggccccagcaccaccaaggccagaaaggccgaggaagcgccgacagg

SEQ ID NO: 245140 - RNA, 77 nt, Homo sapiens
agcagaggggcgagcaggagcgaccgcgccaaacagccaaagaaaaccagcaagacgggagacaaacacaggaacca

SEQ ID NO: 245141 - RNA, 77 nt, Homo sapiens
gcgcggacggcgcgagggagagggacaagccaaggccgcgagaacacgaagagagggccggcacccgccggaaccga

SEQ ID NO: 245142 - RNA, 65 nt, Homo sapiens
ggcaacagggagggacacacccaagcacggaccaaagcgcaggggagaaacagccggaccgaggg

SEQ ID NO: 245143 - RNA, 76 nt, Homo sapiens
gggaagcgacacaaacaaaccgaaagaagaagaggagaagaaaagaccagacgccgggggagcacccagaacagca

SEQ ID NO: 245144 - RNA, 84 nt, Homo sapiens
gccgcccggagccggccagggccggcgcggcgagagaacaggccgaaagggccacaaacccaagggaggccaacagacccaacc

SEQ ID NO: 245145 - RNA, 98 nt, Homo sapiens
cggccgaagagcgggcggagcgagaggccaggagaggaggacgcggcggccccgccacccagagccacggccccacggacaaaccaggacacccgccc

SEQ ID NO: 245146 - RNA, 80 nt, Homo sapiens
acggcagcgccggagacaaccagggagacaagcaaacggggacagcgccgaccggaacagggaccacggaagcccaggac

SEQ ID NO: 245147 - RNA, 79 nt, Homo sapiens
aaagggaccgagaagcgaagacaaggacacggcaaagagaccccccaggggacagaaggagccgagccggaggagcaca

SEQ ID NO: 245148 - RNA, 79 nt, Homo sapiens
ggggagcgacccggggaccgaccggggaccccgccgaagagaaaaacgagcacaacgagaaccgcgaaagaacgccgaa

SEQ ID NO: 245149 - RNA, 77 nt, Homo sapiens
agaagcggaagaagcgccccgaggaaggccaagggggggccccgggacgaccaccgggcacaaccccagcgaggcgg

SEQ ID NO: 245150 - RNA, 77 nt, Homo sapiens
gaggcgcagaaaccccggacaaggcacgccagacgggagcgcaggagcggaagaagccaagaagaggagaggccaag

SEQ ID NO: 245151 - RNA, 74 nt, Homo sapiens
gaagacacaccccgagacgccaaggcagagagggggagaagacaaaaaagaggaaaacagcggagcccgacaaa

SEQ ID NO: 245152 - RNA, 38 nt, Homo sapiens
gagacccccgcagaccgaggaacgcgcgggggacaggc

SEQ ID NO: 245153 - RNA, 74 nt, Homo sapiens
cggcaaggaaggcagcggcgaagggacaagggggaaggcgaagaagagggcaacccgaagaacagacaaaacca

SEQ ID NO: 245154 - RNA, 81 nt, Homo sapiens
caccgcgcccgggacgagcaacaagggcaagcgaggagcagaggcagaaaccgcccccaaagccagagcccaagccaaaaa

SEQ ID NO: 245155 - RNA, 83 nt, Homo sapiens
gggcggagaaccggggccgcaccccagcggaggaagcaggagcagcgccccacggggccaggcgggccaccggagagccgggg

SEQ ID NO: 245156 - RNA, 80 nt, Homo sapiens
aaacgcgaggacagagccacgggagaaggaaggccagaaaggagcacacggaaaaccggacaacccaacgcacccagaga

SEQ ID NO: 245157 - RNA, 79 nt, Homo sapiens
caacacagacccaccagcagaaacccaggccaagcagaaggcaggaaccagagagcaaggagcgcaccgcagccagggc

SEQ ID NO: 245158 - RNA, 76 nt, Homo sapiens
ggccccgggccgccgggaggcggcagcagaaggcggcggaagccccgcccaccaggccaacaaggacccaaggaca

SEQ ID NO: 245159 - RNA, 61 nt, Homo sapiens
aagaggaggaggaagaagaagggagggaggagaaaggagggagccagagaagaaggagacc

SEQ ID NO: 245160 - RNA, 86 nt, Homo sapiens
cgagcacgccggccccgcgcgcgcccgaggccgagcaaggaggagccaccgacccaggccggaggcagggcgcagccggccacgca

SEQ ID NO: 245161 - RNA, 75 nt, Homo sapiens
cagcccgccggcgcgccccacgggccaggaggacagcgaacgggcacgacggccagcgaaacagagaacaaacag

SEQ ID NO: 245162 - RNA, 87 nt, Homo sapiens
agcgggagcgggccgccgaagcagcgcgcccgggccacccccggaccccggagaagcagaggaaaaggccgcacagcgaccacaggg

SEQ ID NO: 245163 - RNA, 65 nt, Homo sapiens
aagggcagggacagcgcaggcagcaggcacaggaagagggcggcacgcggccagagagcacaacg

SEQ ID NO: 245164 - RNA, 77 nt, Homo sapiens
acgaaaggaagagggaaagagaacggcgggccagagcggggcgaccaggaaaggaaaaccaacggcccggaggacca

SEQ ID NO: 245165 - RNA, 86 nt, Homo sapiens
cccggcggcgaggaaagcaggaggaggggcggcggcgggaagaaccagccgacagcgaccaaggccagagcgaaaggccacggcca

SEQ ID NO: 245166 - RNA, 72 nt, Homo sapiens
acaaagagaagcaacaccagaaaagaccaacacagggaggcaccaggccacaaaggggaagccaggaaagag

SEQ ID NO: 245167 - RNA, 73 nt, Homo sapiens
aagggaccaggggaaaagggcaacagcagcaaggcagaaccgaagggaagaccgagagggaaccgagaaaaga

SEQ ID NO: 245168 - RNA, 77 nt, Homo sapiens
ccagaagagcaaagcagccagacaacaccagaacagggggagaaccaggacaggacaaacaacagaccaaggggcgg

SEQ ID NO: 245169 - RNA, 54 nt, Homo sapiens
caagacaccggacaccgagggcccccaaaagggggagaggaagccacgaggagc

SEQ ID NO: 245170 - RNA, 53 nt, Homo sapiens
ggacccaagcgaaaaagcagcagggacgcaccaaaacggacagccgaagacag

SEQ ID NO: 245171 - RNA, 75 nt, Homo sapiens
aaggaccaagaaccagcgcggaccggaaacaacgggacgaagccccaaacacccaaccgaagaacggaaacccca

SEQ ID NO: 245172 - RNA, 79 nt, Homo sapiens
cacaaggacgccggacagcgaaggaaagaaggggacaaccgaaagagccaaccaacgcacacaccgaccaccgaccgac

SEQ ID NO: 245173 - RNA, 81 nt, Homo sapiens
gaggaacaccaacccacagaacaggaaagggagagaaaaagcggaagaagaggaacaagaagcacgggaggcggaaaagaa

SEQ ID NO: 245174 - RNA, 76 nt, Homo sapiens
aaagaaagaagagccgccagaacaaaccgagcccaaagagacaaagagcgcacaaaaaccaaacccacgaaccaac

SEQ ID NO: 245175 - RNA, 77 nt, Homo sapiens
ggggccaaaagccaccagcaggggcgacaacagcacaggcgggcaacacaacaaggcgcggacacccagacaagcgc

SEQ ID NO: 245176 - RNA, 37 nt, Homo sapiens
cccacacccaagcagagcagcccgacggccaggaggc

SEQ ID NO: 245177 - RNA, 67 nt, Homo sapiens
ggggacccgacgcccgcacggacagaccaaaaagaagcaaaaccacgccagaaccgcaaagaagaac

SEQ ID NO: 245178 - RNA, 55 nt, Homo sapiens
cggaggcagaaaccgcccaggagagaaacagcagaggaaagcccgggccacagga

SEQ ID NO: 245179 - RNA, 80 nt, Homo sapiens
cgagcaaggcacagggagccaacagagacggaggagaccgaaaaacacaccagccccacgacccgaagacacaccgcccc

SEQ ID NO: 245180 - RNA, 71 nt, Homo sapiens
accgaagacccgggagagagaaaaaccggacgagcgagcaaggccaaacaaaagcggaaccgggacgagga

SEQ ID NO: 245181 - RNA, 119 nt, Homo sapiens
acagacacagacaaaaagcaacaaagaagaaagaagcaggcaagcgaaaacgcgagagaagagcggacggccaaggaggaggagcgcagcacccagggaaggcagagacgggcagacca

SEQ ID NO: 245182 - RNA, 98 nt, Homo sapiens
gagcaccgacgcccgccggcacgaagccgagccaaaggaacaaggggagaagaagcccagcccacgcgacgaaaaggcccccagcgcgaggagaggac

SEQ ID NO: 245183 - RNA, 78 nt, Homo sapiens
aacgacccacgcccagcaaagacgaaggccagaaggcagaacccgcccagaacagcaagaagagaaagccaaaggaac

SEQ ID NO: 245184 - RNA, 64 nt, Homo sapiens
gaacccggcgccgggacgccccccgcggcaccacccggcaccaggacccagcagccagcgaagc

SEQ ID NO: 245185 - RNA, 80 nt, Homo sapiens
agaagacccagaggacacaaccaaggaaggacgagcccccgcggagacagcccgaagaacccgaacgcaagcggcaacca

SEQ ID NO: 245186 - RNA, 80 nt, Homo sapiens
agcagaccacagacccacagcgaaagcaacaggacggccggagcagcagaacaagagcggagaccaagggagccccgcag

SEQ ID NO: 245187 - RNA, 63 nt, Homo sapiens
gcccacgagaggcagcgccaggcggagcagaccaccgggagcggaagggagagcggacaccac

SEQ ID NO: 245188 - RNA, 85 nt, Homo sapiens
cgcggcgcggccccggcccggcccccgcaggagcaggcgccggggcggggagacgcgggggccccaacgcggcccggggccaggc

SEQ ID NO: 245189 - RNA, 70 nt, Homo sapiens
agcaccccgagaccgcagccccgccccacgccggcagccccacgagaaccacaagcgggaacgccccaaa

SEQ ID NO: 245190 - RNA, 56 nt, Homo sapiens
cccggcgccgcgccggcggcgccaccggggaccgcaaggccgcggggcccaacaag

SEQ ID NO: 245191 - RNA, 86 nt, Homo sapiens
gaagaggaagacccccgccaaaaggaaagcacagcagaaacacaaagcagcccaaccaaagggggcggagccaaaaggccaagaag

SEQ ID NO: 245192 - RNA, 51 nt, Homo sapiens
gacaggcaggaaaagacagggcggggagggggaagggcagggccccaggaa

SEQ ID NO: 245193 - RNA, 80 nt, Homo sapiens
gagacagcgagacccgccaggagcaaaggggggaggcaaagaaagaagcccggaaacgggcggaagccagccaaaagacg

SEQ ID NO: 245194 - RNA, 74 nt, Homo sapiens
cacccaaaagaccaggagccacaaaggaggggcaaaggagcagagaacgacaagccacacgaggacagcccgca

SEQ ID NO: 245195 - RNA, 71 nt, Homo sapiens
aaagcaaggcaggggccccaaaaccggaaaggacgcgaggacaggcccccgcgggcgcacacaggaaggcg

SEQ ID NO: 245196 - RNA, 79 nt, Homo sapiens
gaagaagggaaggcgcgaggaggaaaggaggacgaggggaagagggaaaggaagggagggcaggaaggccaggcgaaaa

SEQ ID NO: 245197 - RNA, 67 nt, Homo sapiens
gccgagcgcagacaacgccccgggagggcccgcagcccccggaagccaaagacccccagggacccgg

SEQ ID NO: 245198 - RNA, 79 nt, Homo sapiens
gcgaggagagcgagggacgagaccgccggccgcagggagggcaggacgagagaggagcgcgggccgagagcggagagcg

SEQ ID NO: 245199 - RNA, 78 nt, Homo sapiens
gacaccaggacagaaaagacaggcgccaggagcacagaagagcgaggagggggagcgggccggagagaagagaggggc

SEQ ID NO: 245200 - RNA, 83 nt, Homo sapiens
gaggcggggagggaggccgacgagcaggagcgccgcaagggaggcgcaggagccggcagaggacccaaccgcgagcaccgcac

SEQ ID NO: 245201 - RNA, 72 nt, Homo sapiens
ccccccccggaaaaggcccacgccgggcgaggggacccgggagacacaccaaccgcggccgacggcacgacc

SEQ ID NO: 245202 - RNA, 77 nt, Homo sapiens
gaaggaccaagaaccagcacccagccacaccccaccgcccagagaagggaagagaggagcgagccgaagccagccag

SEQ ID NO: 245203 - RNA, 79 nt, Homo sapiens
ggacggaaggacgccagcacaacaccggcgcgaggccgacgaggagaggccaaagagaagccaccgaaacgagggagag

SEQ ID NO: 245204 - RNA, 79 nt, Homo sapiens
gagacgacggcagaccagcgcaaagccgccaggcacggggccacaccgaacccagcacgggaggccgaggcgggcagac

SEQ ID NO: 245205 - RNA, 70 nt, Homo sapiens
cccaaggaaaccaggaggagcacgcaagcgagcaccagcaggccgaaacaaccagagagcacgggaaagg

SEQ ID NO: 245206 - RNA, 61 nt, Homo sapiens
cggaagcgcgcgccaagggccgacacaacaccgagacaacggaaagaacgccggacaacag

SEQ ID NO: 245207 - RNA, 74 nt, Homo sapiens
agagcagaagcaggagcgcaacaagaagagcagcccaggacgcaaaagagggacccccaaaggacacaaggaag

SEQ ID NO: 245208 - RNA, 64 nt, Homo sapiens
cagaggccggggaccgccaaccccccaagaagcagagcagagcaccaaacaggggggaaggaag

SEQ ID NO: 245209 - RNA, 94 nt, Homo sapiens
cagcccggccccccagccggcggaaacgacccgccccccgacccgggacccagccgggacaaaccggcgaccacacacggggacgacggggaag

SEQ ID NO: 245210 - RNA, 57 nt, Homo sapiens
aacgaacgaaggacgggggagggagcgggaaacgcacaacagagaacagaaaagacc

SEQ ID NO: 245211 - RNA, 61 nt, Homo sapiens
ccaaacagaggacaggagcacaggaaccacccaagaacagaccaaaggaagaggaaaaggg

SEQ ID NO: 245212 - RNA, 73 nt, Homo sapiens
aggcacagcagaagcaggggacaccagccaggagagaaccagaccgggcggagacaagccagccggacgacag

SEQ ID NO: 245213 - RNA, 70 nt, Homo sapiens
acgcccagggagacccggaaggagggggacaggagccagagaaaaaacgacgggcaacaccggcagcacg

SEQ ID NO: 245214 - RNA, 73 nt, Homo sapiens
gggccggagcgagaccgggcggccacagccgcagggagaacccgaggcgggccagcgaagacggaggaccaca

SEQ ID NO: 245215 - RNA, 78 nt, Homo sapiens
acagagggccgccgcggaccagccacccccgagaggggaacgaggaccgcaacacaggaaacccaccagacaaaaggg

SEQ ID NO: 245216 - RNA, 54 nt, Homo sapiens
gcccccccacccagggaaaacgaaacccggacacaaaacaagacccaagcaaca

SEQ ID NO: 245217 - RNA, 73 nt, Homo sapiens
agcacgcaaagaaggaaacaggaggcggaaaaccccccaaggaaggggcagaccaacaccacccagcaaaaac

SEQ ID NO: 245218 - RNA, 48 nt, Homo sapiens
ccagacgcggggagccgccggagcgagaaggagaagacagaggagcca

SEQ ID NO: 245219 - RNA, 78 nt, Homo sapiens
acggcagcaagcaaagccgcggagaaccgaaccaacagccagccaaagccaggcagcacagcacaggaaaacaaacga

SEQ ID NO: 245220 - RNA, 82 nt, Homo sapiens
cccgccccgcgcgcagcccccgccgagccgccccgagcccgccgccacacccgagcaaaagcaaacagacccccccagccaa

SEQ ID NO: 245221 - RNA, 76 nt, Homo sapiens
ccgcagaccgcgacgcgccgcacagagcaacgcgccccagcacaggacccaaagacaggaccacgcaccagcagag

SEQ ID NO: 245222 - RNA, 64 nt, Homo sapiens
cgggaccccccgcccccgccagccaccaccagcccgccgagaagaagagagaaaaaccaaagca

SEQ ID NO: 245223 - RNA, 81 nt, Homo sapiens
agagggaaagggaaggagaaggagggacgcaggcgcaggccagggaagaacccgaagggaaacaagaggcccaagaaacag

SEQ ID NO: 245224 - RNA, 76 nt, Homo sapiens
cgcaaaggaaggcgccgggcccgacccgcgagagagcgaaagcacacgaagaggcagcccagaagaagaaagcaag

SEQ ID NO: 245225 - RNA, 59 nt, Homo sapiens
ccgccggagacagccaaggggaacgaagaaggacagaacggacaaggcagagcaaggaa

SEQ ID NO: 245226 - RNA, 80 nt, Homo sapiens
aacagcaagcaccccagcccaaagcccgacggccaggaggcgaagagacgaggaagcccaggagcccgaacacaaaaaga

SEQ ID NO: 245227 - RNA, 60 nt, Homo sapiens
cgcggcgcggggaaaggcgcgagacccagaggccgcgagacagccccaaggcggagaaaa

SEQ ID NO: 245228 - RNA, 82 nt, Homo sapiens
gccacaacagccaaggaaaaaaagcagagaggagcggggagcaagcagggggagcccgcgccaggggcaggcccagacccac

SEQ ID NO: 245229 - RNA, 80 nt, Homo sapiens
caggagcacacccggagaagcaggagcccaccggcagggaccccggcccagcacggccacaagaccagcacgcgccacac

SEQ ID NO: 245230 - RNA, 79 nt, Homo sapiens
aggagaggaccggaaagacagaaagaagccacccgaccacgacaaggagggaaagcccacagcgaagccaagcaaaagg

SEQ ID NO: 245231 - RNA, 74 nt, Homo sapiens
gccggccggacaagcccaggagccgaccagagagcagccacagaccggaccggagcccgagagaccaccaccac

SEQ ID NO: 245232 - RNA, 72 nt, Homo sapiens
agaggcgcgggaaaacaaacacacaaaagccagaacgcaggaaccaaaacacagagacgggacaccagggcc

SEQ ID NO: 245233 - RNA, 69 nt, Homo sapiens
gcggagaaaccaacagcggcgccagcaagaaagacagagcaccaggaggacaggacagcggcagcagag

SEQ ID NO: 245234 - RNA, 80 nt, Homo sapiens
aagccagaccgccaggaaaggcaggagagcgaaagagagcggaaaaacgaccaaagaagccacagagagcacagaggcca

SEQ ID NO: 245235 - RNA, 88 nt, Homo sapiens
aaaaaggagagcacggacgccaagacacgacaagacgaccgggaaagccagggaggccgcgaaggcgggggccggccccagcccagac

SEQ ID NO: 245236 - RNA, 49 nt, Homo sapiens
acaccagcgccagcccaggggaccccacaccacaaaccgaggaaagaag

SEQ ID NO: 245237 - RNA, 72 nt, Homo sapiens
cgggaggagacgggcccccccaggggaaacccacaccgagaccgagagaagcaccagcaggcaccacggccg

SEQ ID NO: 245238 - RNA, 72 nt, Homo sapiens
gccgacgcccgcgccggcgccccgggaagaccgcaggaaagcaggaaggcaagaaagccaaggacgaaaccc

SEQ ID NO: 245239 - RNA, 75 nt, Homo sapiens
cgacgagagagaccggagaggggagagggggggcccaccacgcccagcgaccgggcgggggccggccagcggaca

SEQ ID NO: 245240 - RNA, 78 nt, Homo sapiens
gcagcggggaggccgcccggcgcagcggggaccggcggcggcgcccaggcacccggcccggccaccaggagagaacgc

SEQ ID NO: 245241 - RNA, 64 nt, Homo sapiens
gagaacccaagacgccccaaaggaagagagcagcccgacggccaggaggcgaagagacgaggaa

SEQ ID NO: 245242 - RNA, 76 nt, Homo sapiens
acaaaagaagagagcgggcccccccgaagggggccgacagaaccccacacaggaaccacccgcggaccggagacgc

SEQ ID NO: 245243 - RNA, 84 nt, Homo sapiens
ccaaccccggccggggccaccgagccaacggagaggcccgcagcccccggaagccaaagacccccagggacccggccccagcac

SEQ ID NO: 245244 - RNA, 55 nt, Homo sapiens
agccaagccgagccgccacccggcgacgcaaaggcaccggaacagacccacaagc

SEQ ID NO: 245245 - RNA, 74 nt, Homo sapiens
agacgagcagcgaccgaagggaccagcaagcaagcccgcgcggccgcgcggaccagggcagggagaagaggagg

SEQ ID NO: 245246 - RNA, 77 nt, Homo sapiens
cggcccccgaagcccaccggccccaacgcacagccagggagccaagcgccgcccggccgagaagacagaggagccag

SEQ ID NO: 245247 - RNA, 73 nt, Homo sapiens
accgccaggagagcacaaagaagccaggggagagcgcaccagggcagagccgccgagccagagacccaaagcg

SEQ ID NO: 245248 - RNA, 45 nt, Homo sapiens
agcagaaacccggcacgaaggagagaagaagacagggcccaaaaa

SEQ ID NO: 245249 - RNA, 74 nt, Homo sapiens
ggcgcggacacgcaaaccacacaagggcgacaggagccaagggaaaacacaccaaacggaacccggggaccacc

SEQ ID NO: 245250 - RNA, 72 nt, Homo sapiens
gagccgccccagggaacgcgcaacacaaagagcaggaggaccccaacaagcggcaaccagcggccgacaaca

SEQ ID NO: 245251 - RNA, 83 nt, Homo sapiens
ggcagacggcgacagggcggcggcgccaggcagggcgcagaaagaccacacagggaaacgaccagggagagaccaacaggaac

SEQ ID NO: 245252 - RNA, 75 nt, Homo sapiens
aaagaaggagggacgaagagagccagggcgaagagacacaacaaggccaagcagaccggcaacaggaaacagaac

SEQ ID NO: 245253 - RNA, 67 nt, Homo sapiens
gacggcaaagggcgggggcaaagcggagaccggcaggagggaccaaggaacagaagacgcccgaaac

SEQ ID NO: 245254 - RNA, 74 nt, Homo sapiens
gggcggcccggggccgagcggcccccccgacacgcgccgcggcgcggagccagcgcccggcaaggagcgagcgg

SEQ ID NO: 245255 - RNA, 77 nt, Homo sapiens
gaccgggcagaacaacgaacagaagcacaaccagagccggccccgagcccacaggcggggagcgcccccaggagcag

SEQ ID NO: 245256 - RNA, 77 nt, Homo sapiens
gcccacaggggggggcaaacccgagagaacggggcagagacaggcaacagacggcaacgaaaggcacaaaaacgcaa

SEQ ID NO: 245257 - RNA, 77 nt, Homo sapiens
gcgaggagcccagccggaccagaccgggcacagcaaagcgaggaccagaccggccgcaagacgccggggaggcagaa

SEQ ID NO: 245258 - RNA, 83 nt, Homo sapiens
aaggccaaggagaaccccccaggcgcagggcccgaggcaccaacgcaaggacccccccccgcgggcgccccaggcacagcgcg

SEQ ID NO: 245259 - RNA, 66 nt, Homo sapiens
accggggcccggcgcccgggcccgccccggagggggcacgaaacccaaaacccaggagggcaggag

SEQ ID NO: 245260 - RNA, 52 nt, Homo sapiens
ccagggagccggaacgcacaccgagcggcaaacagaaagaccacagcaagac

SEQ ID NO: 245261 - RNA, 76 nt, Homo sapiens
ggagaccagaacgaacccccccccccgacacgcagcggccgaggcaggggaagagagcggccccggacacgcgagc

SEQ ID NO: 245262 - RNA, 65 nt, Homo sapiens
aaaagccaagagcaggaacaggagagcaaacaaagacaacccagaaaagaaaaggccaggggcgc

SEQ ID NO: 245263 - RNA, 67 nt, Homo sapiens
caaaaacccagagcagcagcaagaagagaagaggagaggacagacccagcacaaaacagcagggaaa

SEQ ID NO: 245264 - RNA, 48 nt, Homo sapiens
aacaccgacgacccccagagcagccccgggagaagcagaccgcaccag

SEQ ID NO: 245265 - RNA, 76 nt, Homo sapiens
aggagccgggccaaagggacgcgccaacaggagcccccgaggaaagcacgcacaacgaggaaaagagaaaaagagg

SEQ ID NO: 245266 - RNA, 87 nt, Homo sapiens
gagcggccggaaacgagggagccccggggagcggccaaccacgaccgacggacaccacccgggcggagaacacaaggaacgaaagga

SEQ ID NO: 245267 - RNA, 56 nt, Homo sapiens
caggacaggagagaaagacgggcgcaagggagagagagggagcggccggaacaccc

SEQ ID NO: 245268 - RNA, 71 nt, Homo sapiens
cccccgccgcgagacgccgccgacgccgcgcgggccgcgcgcgcgcgcccggaaaccggccgccgaccccc

SEQ ID NO: 245269 - RNA, 55 nt, Homo sapiens
gagcgacgcgcggagcgagagagacacccggagcgcggacaggaaaagagaggaa

SEQ ID NO: 245270 - RNA, 78 nt, Homo sapiens
ccgagaggcaagaagccagccaggaggcgcgcagcaggcaccaggacacacgaccgaaagccgcggaggcaagaacca

SEQ ID NO: 245271 - RNA, 71 nt, Homo sapiens
ccccccggcgccgcgccggcggcgaacggcggccaaagcgccagacaagggccgagccccggagagccccc

SEQ ID NO: 245272 - RNA, 78 nt, Homo sapiens
gggcccaaggcccagaagacagaaggaagccggccacaggagggaacacagaaaagcgacagccgaaacacggaaggc

SEQ ID NO: 245273 - RNA, 79 nt, Homo sapiens
gaaaggacccccccaggccaaagaagaacaacagaggaggaaagaaggcaccaaccaaagaggggaacaggaccgaaac

SEQ ID NO: 245274 - RNA, 46 nt, Homo sapiens
aagaagaccacacgcaaaggcagccagcaccacagagcagaggcag

SEQ ID NO: 245275 - RNA, 51 nt, Homo sapiens
ggcagacaaaagggccaaagaagggagagaggagaagccgcgggagcggaa

SEQ ID NO: 245276 - RNA, 89 nt, Homo sapiens
gcccacaccggcggcgggagaggcacgggcgcagccgcccgcgagcgcggagcgcggcgccagaaagccaagccacccaggaaggaaaa

SEQ ID NO: 245277 - RNA, 101 nt, Homo sapiens
cgcgcacccacgaacgcccaccccccgaacccagccgcaccgggaccaagaaaggcccagggaccaaagcccggacaaggcccgagcaccaggaccgcaga

SEQ ID NO: 245278 - RNA, 69 nt, Homo sapiens
gaaaaccgccaaggaccgaccccaaacgcacagagacgccaaaggagggagccaaggggcaacaaaaca

SEQ ID NO: 245279 - RNA, 76 nt, Homo sapiens
cgggccaggaaagacaggcaggggaaaggaagggagcagcgaagccagggaggagccgaaacaaaaggaaaggaga

SEQ ID NO: 245280 - RNA, 69 nt, Homo sapiens
acagaccaccacgccaacgaggggaagaagggacaagcaaccaccaaaaagggcgagcagaggcaaaaa

SEQ ID NO: 245281 - RNA, 84 nt, Homo sapiens
ccccccgggccccgagccagcccacgcagccgccccgaaggagccagggagaaacggacaacacccggagcagaaggcacgcaa

SEQ ID NO: 245282 - RNA, 54 nt, Homo sapiens
cccaggagcgggaacagaggagcgccggcccaggcggaagcaaggcagaccggc

SEQ ID NO: 245283 - RNA, 72 nt, Homo sapiens
ggcgagagagacagggaggaagcgagcacaagggacaagcgggaacaagaaacggggggacggcaaaagaag

SEQ ID NO: 245284 - RNA, 71 nt, Homo sapiens
acggcaaagaacccggcgagaggagccaggcgaagggggggccgagaaaccaagaccaggacacaaccacc

SEQ ID NO: 245285 - RNA, 79 nt, Homo sapiens
accgaaccccagcagaccgacgccgcccggcccccagcacaagggggcaccaggcggagaaggacgccacacgcaggga

SEQ ID NO: 245286 - RNA, 69 nt, Homo sapiens
caaccaccaaaacccagaaccagaacgcacgacagggaacaaagacagaaaaagaggcggcacgggcgc

SEQ ID NO: 245287 - RNA, 85 nt, Homo sapiens
gggccgaccagaaaggaaccccaagcgacgcaggcagaagcgagacggcaagcggacaggccacacgcaccaggcagcaaaaacc

SEQ ID NO: 245288 - RNA, 71 nt, Homo sapiens
cagggaaacggccggggggaagccgagccacggcacgagcgagcaccacaccgccacgcacggcgaagggg

SEQ ID NO: 245289 - RNA, 86 nt, Homo sapiens
gacgcccaccacgggaaggacgccaagaggccgaggagaggcccccagacacgggaaagcaccagccccgccagcacagggggcag

SEQ ID NO: 245290 - RNA, 74 nt, Homo sapiens
gcagagacaggcgcgaggagacaccgcaggggagcagcggaggaagccacaggacgccggggaccgacaggcca

SEQ ID NO: 245291 - RNA, 76 nt, Homo sapiens
ccacgcgggcccaaacacgacggacaacgagagaacaaggccccccaacagccccgccgaggcccccgccgcccag

SEQ ID NO: 245292 - RNA, 63 nt, Homo sapiens
aaaacgccacccaaaggcggccgccacgggacaggacaaaggagagcagcccagcggagcgag

SEQ ID NO: 245293 - RNA, 79 nt, Homo sapiens
accacgcagaacgcccaaccaggccaagggcacacgggccacagaggaccagcaaggagaagaaaggagcagcacagac

SEQ ID NO: 245294 - RNA, 77 nt, Homo sapiens
ggagccccccaccaggaaggacgcgcccaggaaccgacagacgaccagacgccgcggcccagcaacccccagccaca

SEQ ID NO: 245295 - RNA, 75 nt, Homo sapiens
gcgacagcaggagccccccgggcccaccgccagcgcgccgccaggagaaggaagggaaggcacaacccagcaggc

SEQ ID NO: 245296 - RNA, 77 nt, Homo sapiens
acagcggcagacggaggagagggaagaccgcaggaaagcaggaaggcaagaaagccaaggacgaaacccacacggag

SEQ ID NO: 245297 - RNA, 73 nt, Homo sapiens
aaagagagaaccccaaccggggaggaaaaccgacgaagaggaagaagccaagccaagagacagcgcccccaca

SEQ ID NO: 245298 - RNA, 78 nt, Homo sapiens
aaaaaacccagcgaagaccacagaaaccaaaagaaagcgccagcagcgaaccccagacggaaagcccacccacacaag

SEQ ID NO: 245299 - RNA, 67 nt, Homo sapiens
gaaaagccacaaagggaaccaggaaaagagaagagaacgagcggaagaggcagaagccgaaggagag

SEQ ID NO: 245300 - RNA, 76 nt, Homo sapiens
gcccagggcccccgggaccaggccgaaagcgcgcgggccacgacgccacacacagaacgacaccacagcgacaacc

SEQ ID NO: 245301 - RNA, 80 nt, Homo sapiens
acggcgggaagagaagacacgagcacaaacgggaggcaccgccccaacccccccccgcccggagaaccccgcggaacgag

SEQ ID NO: 245302 - RNA, 80 nt, Homo sapiens
acagcgaggagcgagggacccggaacgcgggaccgccacggcagcaaggacgcacccgggagaaccggagcaggaaagcc

SEQ ID NO: 245303 - RNA, 76 nt, Homo sapiens
aggcccccagccgcagccacaacaccggcaggaaccaccaggacagacacccaggaccgggcaacccagaccagaa

SEQ ID NO: 245304 - RNA, 33 nt, Homo sapiens
ggggcaccggaccgaggaaggagggccccggag

SEQ ID NO: 245305 - RNA, 71 nt, Homo sapiens
gaaaaaagagcacgaccgaacgccaaacccaagggggagagggagaagcggcacaggaggagaggaagcgg

SEQ ID NO: 245306 - RNA, 70 nt, Homo sapiens
aagagaaacccggaacgaccgaaaaaaaaccgcaaaaccagcaagagaggcgaggcaaacacacagccaa

SEQ ID NO: 245307 - RNA, 70 nt, Homo sapiens
acacaacccaagaaacgggcaggaagaggagaggcggacgcagggccgaacggagaccagagggaaaaca

SEQ ID NO: 245308 - RNA, 83 nt, Homo sapiens
ccagccagcacacggcaagcaaacagaagaagccagcagccacaccagagaagcgccccagcagcaagccgccaggaggccac

SEQ ID NO: 245309 - RNA, 38 nt, Homo sapiens
cgcaggccgggcccaagagcgagacccccagacccccc

SEQ ID NO: 245310 - RNA, 85 nt, Homo sapiens
agcgggacggacaggcagggaagcaacgcagaggcgcagacgggcggccggcacaccaccagacggagaagcagaggaggaagca

SEQ ID NO: 245311 - RNA, 77 nt, Homo sapiens
gaggggcaacaccgaacgaacacccaacaagccgcaacgaaaaccggaaaagggcaccaacccaggcgacaccccgg

SEQ ID NO: 245312 - RNA, 78 nt, Homo sapiens
aggccccccggcaccgcgccgcgccggggcgcccggcacccgcggacagaaggaccagccgcccacgagcccaggcag

SEQ ID NO: 245313 - RNA, 79 nt, Homo sapiens
ccgaaaggccagagcacccacgggaggcaggagcgagaagagaggaagaaacaaacagaagcgccaagcaaaaaagaac

SEQ ID NO: 245314 - RNA, 59 nt, Homo sapiens
ggcacgggagccccgaacaccacagggagacaagccggaggagccaccaacagaagcag

SEQ ID NO: 245315 - RNA, 85 nt, Homo sapiens
cggcccgcaacgggcagaaaaaggacagaagcagacaacaccacggggaacgcggacaaaggacaaaagaccaaaaacagcgggc

SEQ ID NO: 245316 - RNA, 68 nt, Homo sapiens
gggaaccccaccgcgaccgccccggccgcgggagaacggagcaccccagcccacccacgcacccgagc

SEQ ID NO: 245317 - RNA, 57 nt, Homo sapiens
aaacacggacacggagcagagcagccagagcgcaccagcggaccgagcaggagggaa

SEQ ID NO: 245318 - RNA, 38 nt, Homo sapiens
agaaaaggcagccaaacgcggcaggagggaaagcaagg

SEQ ID NO: 245319 - RNA, 35 nt, Homo sapiens
agccccgggggccacgagcggcagggagaccacga

SEQ ID NO: 245320 - RNA, 74 nt, Homo sapiens
ggcgaggcaccccaacagcagagaaacaagggggaccccaagaagaagcggaagaggagccgcggaaccaagac

SEQ ID NO: 245321 - RNA, 87 nt, Homo sapiens
ggcacaagcggggggcagcccccgccggcaccagggcagcaggaggggggaagcaggaggcacggaggggaccccagaaccccagcc

SEQ ID NO: 245322 - RNA, 80 nt, Homo sapiens
cgagggggcacagaagcgggcggcggcgcgccgccccgggcggccgcgggcgggacgcaggaccagggcgcgcacgagcc

SEQ ID NO: 245323 - RNA, 83 nt, Homo sapiens
cacccgcgcgcgcccgggaggaaggaacgaggcaaggagcaaagcagcggcgcagcccggggaggcaccggccgcgaaaggcg

SEQ ID NO: 245324 - RNA, 41 nt, Homo sapiens
ccccaacaacaccgcgagacgaggaaaggaagccagaaccg

SEQ ID NO: 245325 - RNA, 86 nt, Homo sapiens
agagcgcgagacccagccaaagagagcccggagccagcggggaggccgcgccgcgcgcgccgccaaaggagcggagcccgaaagag

SEQ ID NO: 245326 - RNA, 82 nt, Homo sapiens
cgggcaggacgggaccagcccggcggaagagagaggaccggaaaacccccaaggccaggagagccccaacacccacgccccc

SEQ ID NO: 245327 - RNA, 80 nt, Homo sapiens
gggcaggcaggcgcgagaaggacgcgcagccaccccagggcgccacccagcccagcaagagcaccggggcggcagcaggg

SEQ ID NO: 245328 - RNA, 66 nt, Homo sapiens
ccaggagaaccgagcaggccacccaggaaacgcagcagaggcagaacggaagggacacagaagagc

SEQ ID NO: 245329 - RNA, 51 nt, Homo sapiens
ggacacccaagaaaaagaccccgacagggaaccaccagccgcgggccgcag

SEQ ID NO: 245330 - RNA, 74 nt, Homo sapiens
cgagaggcgccagcccggagcagggcaggcaccccgccaggaagaggcggcggcggaggagccccgcagcagag

SEQ ID NO: 245331 - RNA, 55 nt, Homo sapiens
cgcgagagggccggcaggcccgggaaggacggcccgccacgggccccgcagccgc

SEQ ID NO: 245332 - RNA, 85 nt, Homo sapiens
gcaaggcgacgccagaggaggaaaggaagacaaggacccagccgagcccacgggaggcagaaagcaccggcaccggagaacacga

SEQ ID NO: 245333 - RNA, 83 nt, Homo sapiens
gggcgagcggcggggagcggcgaagccgcgggcgaggggacagaccagagcaggaccaaaggcgcacagagccgaaccccacc

SEQ ID NO: 245334 - RNA, 66 nt, Homo sapiens
gggagaagccgaccgaacgcgccagcgcggggcaacagaggaagagaaacaccaaggaaccacaca

SEQ ID NO: 245335 - RNA, 75 nt, Homo sapiens
ccgcggcgcccgagcggcgggccgcagagacagaggcacaaaaggagaaagcagaagaaacaggagaaagcaaaa

SEQ ID NO: 245336 - RNA, 75 nt, Homo sapiens
cgccggggaccccggcagccacccaccgccgccgcccccagagccaggacaaaaccaggcagaaccaacacgaac

SEQ ID NO: 245337 - RNA, 75 nt, Homo sapiens
acagcggccgggcgcccggcagcggcagcgggccaagcgcaacgccggcggacgagcagcaggcgcaaaaacgaa

SEQ ID NO: 245338 - RNA, 78 nt, Homo sapiens
caaggccacccagccacgaggaaagcgaaacaccacgcgcggaaacacgaaggcagccggaagggcagaggacaaaag

SEQ ID NO: 245339 - RNA, 112 nt, Homo sapiens
accccgggcaaaaaagaaaagaagagagagagaagcaacggaccccaagcagagaggcgccggccaggcggaggcagggacaagcacggccacgcagccgaccccgggacaa

SEQ ID NO: 245340 - RNA, 76 nt, Homo sapiens
gaagggcgggcagcggagccgaggaccaggaagggaccacagaccagcacgccggcgccacgaaccgagcgacagg

SEQ ID NO: 245341 - RNA, 90 nt, Homo sapiens
cggccggcggccggaggagcggcgcgcgcgcgcgcgcggggccccgcagaccagggcaggacaaccgaaggacaaaacaccgcagaaaga

SEQ ID NO: 245342 - RNA, 68 nt, Homo sapiens
ccacacaccacaggaaaagcaggacaccaagcggcgagacgcaggagcccgagaaaagcacagcaccc

SEQ ID NO: 245343 - RNA, 82 nt, Homo sapiens
cgagcgagcgccccagcgagaaggagggagaaaggcgggcccgggaacaggccacgcagaacaaaagacgcacagagacgga

SEQ ID NO: 245344 - RNA, 39 nt, Homo sapiens
agaagcaggaggacgcgaggcggaagagagcagcgaagc

SEQ ID NO: 245345 - RNA, 77 nt, Homo sapiens
aaaagaagaaccaaccagaaacacaggccggccaacaggacggaaaaacagaaaacaagaagcgcgaagcccaggca

SEQ ID NO: 245346 - RNA, 84 nt, Homo sapiens
gcagccgcggaccaccgccgccagggaaccagacgccgcaggcccacgcagcggaggcggggaaaggccccacgaacggcccaa

SEQ ID NO: 245347 - RNA, 75 nt, Homo sapiens
cagagaacccagacaacaggacgccgccaagagcccgggggcgcaccaggcacaggcccgagaggccacacacag

SEQ ID NO: 245348 - RNA, 65 nt, Homo sapiens
cccaggccgaagcccgacaggcagaccgaccaaacagggagcagcggacaggagacaggaaccaa

SEQ ID NO: 245349 - RNA, 77 nt, Homo sapiens
ccgccaaggcgacccccaccgagacgaagcgggcggcgaagggcggagaacggaaaagcaccaggaagcagagagga

SEQ ID NO: 245350 - RNA, 74 nt, Homo sapiens
gagcagcagcacgaaaccaaagggaaaacagagacagcagcagacggggacaggagagaacaagcagaccaaga

SEQ ID NO: 245351 - RNA, 73 nt, Homo sapiens
gaacccaaaggaggaaacagcggcaagccacagacggccccgggaggagcacccgcacccggccacccgcggc

SEQ ID NO: 245352 - RNA, 72 nt, Homo sapiens
ccaaggccacgaaaggccaagccggcaagagggaagacacagccccccaggaagggcgcggagcccagcaag

SEQ ID NO: 245353 - RNA, 90 nt, Homo sapiens
ggagccgaagccagacgggcacacaccggcagccacagcccgaagcggcaagaagagcgccgggcacaggcacgcagcggcccgggacac

SEQ ID NO: 245354 - RNA, 84 nt, Homo sapiens
aaggagcccggccccacaccggcacacagcgcgcggggcggagcggagccgcggcccacgcggcgggagcacgcggaggccgcg

SEQ ID NO: 245355 - RNA, 74 nt, Homo sapiens
gcgggggaggggagcccgcgcccgccgcgggagagaggacccccccccccccccaagaaagaagagaaagcaac

SEQ ID NO: 245356 - RNA, 84 nt, Homo sapiens
gcgacccgccgcgcgcgcacgcccaggccgcggagcgggacccagaacgcgaggcagaggcccacagagggacgccgcgacacc

SEQ ID NO: 245357 - RNA, 71 nt, Homo sapiens
agaaaggggaaccccggagaaaaggccaagaaggcagcaagcgacaaacaacaagcccggaggcaaaaacc

SEQ ID NO: 245358 - RNA, 80 nt, Homo sapiens
caaacagcacccggcaagaagaacacagggggaagccaagcagaacaaggggccagcacagacacagccagccaaacaca

SEQ ID NO: 245359 - RNA, 77 nt, Homo sapiens
gagaagcaaaacccagagaagagagaagaacaccgaaaccagaagggagccaggacgccccaaggcccgcagggagg

SEQ ID NO: 245360 - RNA, 56 nt, Homo sapiens
cgccccaacaccagggaagagacacacccagcaaacgaaaccggcagcagccggag

SEQ ID NO: 245361 - RNA, 76 nt, Homo sapiens
agagccacccgggagaggaagagcgaggaggaacgcgcaaggcaaagcaccggaccagcgccaggaaacagagacc

SEQ ID NO: 245362 - RNA, 89 nt, Homo sapiens
ccgggccagccccccagcgacccacagcgacaaaggcagcagcaggacgcacgggaagaaagaggggacaacacaagggaggaaggaca

SEQ ID NO: 245363 - RNA, 78 nt, Homo sapiens
caaccgcgacccaaacacccaacgagacgggcaagcggggaggggagaggcacacgaaaggacccacacacagacacc

SEQ ID NO: 245364 - RNA, 83 nt, Homo sapiens
gcagcagccagagcgcagaggcggcggggcgagagggcggcgaaggaggcagaggcacagcgcagacccagcagccacaacga

SEQ ID NO: 245365 - RNA, 65 nt, Homo sapiens
aaaaaccaaggacaggacccacacaccaggcgaaagcccagagcaccgaccggaagccgaacgcc

SEQ ID NO: 245366 - RNA, 76 nt, Homo sapiens
aagaagcccagaaaacacgccaacgccgcccaagagagcaagaccgggcccacgaggaccccggaggaaaagcgga

SEQ ID NO: 245367 - RNA, 57 nt, Homo sapiens
agccgagaaggaggcccggccccggacaggggaaggcacaacccaggggcccacgcc

SEQ ID NO: 245368 - RNA, 87 nt, Homo sapiens
agcagcccagacgcggcacagagagggccgggagcgcgcagccaggaggagaagcggagggggacgagacgcagccgaccggcgcag

SEQ ID NO: 245369 - RNA, 37 nt, Homo sapiens
caagagcgcccgcacgagggaccagccgcaggccgcc

SEQ ID NO: 245370 - RNA, 94 nt, Homo sapiens
gcaaccgcgccgagagccagacagcgagagagaccacccagggccgagggaggcggagcgggcccacacaagaacacaaagggccagcagaaaa

SEQ ID NO: 245371 - RNA, 70 nt, Homo sapiens
ggcccggggacccacacccaggcacacagagaaaaaaagggaacaaaacacagcaagcagacaaaagggg

SEQ ID NO: 245372 - RNA, 60 nt, Homo sapiens
agccagaaccaacccacaccagaaaggacacacagaggcgggccaagcccggacaacggg

SEQ ID NO: 245373 - RNA, 73 nt, Homo sapiens
acggcggcgcccccagaccaggccggacaccccaaaagcgaaaaaaaaggacagaaaaaggagagaagaaagg

SEQ ID NO: 245374 - RNA, 91 nt, Homo sapiens
gcggcggaggcacacggaggacggcaggacgggccggggggacacgcggggcaacacccagcccaaccccaggggcaccggccgaacacca

SEQ ID NO: 245375 - RNA, 91 nt, Homo sapiens
cccgccgcaggacacgcaaagcacacccgagggcaagaaggaacagacaaaaacggccggaaggaaacacaggacaccagggacagcgaag

SEQ ID NO: 245376 - RNA, 56 nt, Homo sapiens
ccgagaccagacgaggggagcgcaagcaaagcaccgggagaagcggcccccgaggg

SEQ ID NO: 245377 - RNA, 72 nt, Homo sapiens
cggaggagaaggagaccagacccggcacaaagaggaagccgagaggcaacacgcaaacgccaggacggacga

SEQ ID NO: 245378 - RNA, 77 nt, Homo sapiens
aaccccaagccaaccgcaaaaccaaacgcaccgaccaagacagaccccggcggcgacacagcgagagcaggcccggg

SEQ ID NO: 245379 - RNA, 80 nt, Homo sapiens
ccgccaaggcgacccccaccgagacgaagcgggcggcgaaggaagaggaagaaaagccaaacagaggccaagggcacggc

SEQ ID NO: 245380 - RNA, 76 nt, Homo sapiens
aacaacgaggcaccacaccgcacagcaagcgggcaggaaacaagaaacccgaagagcccaagcagccaagaaaaag

SEQ ID NO: 245381 - RNA, 72 nt, Homo sapiens
ccccaccccggcccagggaaaaccagacgagagacagaagacgaaagggcaagaaagagagcacggacaaga

SEQ ID NO: 245382 - RNA, 55 nt, Homo sapiens
gaaggcgagacaaggggaacacaggagcagcagccggcccggcgccagcaggaaa

SEQ ID NO: 245383 - RNA, 69 nt, Homo sapiens
ggggagcggaaaagggccaagaacacggagaccccaaaccagcaaagaagaagaacaagaagaggggaa

SEQ ID NO: 245384 - RNA, 56 nt, Homo sapiens
ggaggcgcagaaagagggaagaccaaagcaagggaggagaagccagccccgcggcg

SEQ ID NO: 245385 - RNA, 79 nt, Homo sapiens
cccagaagcaaccgcccacagcacggcggggccgcccagcgcaagagaaaggacccaaagacaggaccacgcaccagca

SEQ ID NO: 245386 - RNA, 75 nt, Homo sapiens
cgagagccgcccgggccagcggccgcgcacccccggccggaggcaccagcagaccgaaggagcagacgaggcacg

SEQ ID NO: 245387 - RNA, 72 nt, Homo sapiens
gcgagagaagcgcaaaaaccccgagacagaaaaggcaaaggacagccacacaagcaagagcagcacagccga

SEQ ID NO: 245388 - RNA, 84 nt, Homo sapiens
aggcgggcccgcgggccgggagcgcggcggagacgagccgagacagagcacgcccggcacaggaagccggagaaccgaaggacc

SEQ ID NO: 245389 - RNA, 83 nt, Homo sapiens
agagcacagagcaccacgaacaaacagaaagcgcgaagaggggaagcaaagcaaaacgccaccagaggaagacgagagaagag

SEQ ID NO: 245390 - RNA, 81 nt, Homo sapiens
ccccgggccccggccgcggggcccggcgaagggcaggggacaaacaacggaaagggcgaagacaacaggccacgccaaccc

SEQ ID NO: 245391 - RNA, 62 nt, Homo sapiens
gcaccgaggaccagccaagacaggacccaaggccagccagccccaggcaccagcggacagga

SEQ ID NO: 245392 - RNA, 102 nt, Homo sapiens
ccgagagccgcccgggccagcggccgcgcacccccggccggaggcaccagcagcggcgggaggggaaggagcagccacccgggcagaaaggccgggcgaagg

SEQ ID NO: 245393 - RNA, 67 nt, Homo sapiens
gggagccggcccaagcggaaaagagacgggcaaccagcaagcagggggcgagagaagcaaacacacc

SEQ ID NO: 245394 - RNA, 64 nt, Homo sapiens
gcgacacaggggcgagggaaggacaacggaaacacgggcccgacacccgcggacgcaggcgaga

SEQ ID NO: 245395 - RNA, 80 nt, Homo sapiens
ggcgccgccccaagagcgcagacggccagccgaaaccacggaaggagaaggcaccacggcacgagaagggcggcagagga

SEQ ID NO: 245396 - RNA, 72 nt, Homo sapiens
ccacccggaaggaaggcccagcgccaaacgacaaagcccggcgcaggacagaaagacagagcaaccacggca

SEQ ID NO: 245397 - RNA, 55 nt, Homo sapiens
agcccccaagagcgggacgcagagagaacacaagaagaaagacagcacgggccga

SEQ ID NO: 245398 - RNA, 74 nt, Homo sapiens
ccgcgcccacggccgggccacccacaggccgcaaagggccaggccgccacgaaaacaagaaagaaccccacagc

SEQ ID NO: 245399 - RNA, 68 nt, Homo sapiens
gaagagcaccgggagcggcgaagaggcaccggaggagaccgccggacaagggcagcccggaccggaaa

SEQ ID NO: 245400 - RNA, 41 nt, Homo sapiens
gcgcccgcggagggggggcagacccaaaggaaacgcacgaa

SEQ ID NO: 245401 - RNA, 82 nt, Homo sapiens
cggcgagggaaaagcgaggcaaggcaggcgggcagacacgagagcacaacacagcgacgagcccgaaccggggggaccaggg

SEQ ID NO: 245402 - RNA, 38 nt, Homo sapiens
gcccgggcccccaaaagccagggcgcgcgccccacgac

SEQ ID NO: 245403 - RNA, 76 nt, Homo sapiens
aagcccccacggaaggccacgagggcggaccccggcccggccaacgcaacagggagcccacgcaagaggggccggg

SEQ ID NO: 245404 - RNA, 73 nt, Homo sapiens
agccacccaccgacgccgacaggcagagccgcaacccgagcgagccacccccggcgcccgcgggcccgccagg

SEQ ID NO: 245405 - RNA, 86 nt, Homo sapiens
ggaaacgggcgaagcgacgagccgcgaggagggcagcggcggagggagggcagccagaaccggaggaccagaagaagcacgagaag

SEQ ID NO: 245406 - RNA, 83 nt, Homo sapiens
ccgaccgcggggccggcacggggagcgcgccagaggccagcccgcggcccgaaggaagcgacagcccggggcgagacacaaga

SEQ ID NO: 245407 - RNA, 70 nt, Homo sapiens
gcccgccccccgagcgacggaccgggaacaccgaggagaagacagaggagccagaccaagagacagcaca

SEQ ID NO: 245408 - RNA, 72 nt, Homo sapiens
ccagcgccccagacgcccgggccggcggcgaagccccgcagcagggacgagaaaggcccgcagaggagagga

SEQ ID NO: 245409 - RNA, 86 nt, Homo sapiens
gccgcagcgccccacccccggcggcggcacgagcccgaccaggaggaggacagcgaacggaggagcgacggccagcgcgcacaggc

SEQ ID NO: 245410 - RNA, 87 nt, Homo sapiens
acaccgcgaaacccaagaaccaaaaggaccgcaggaggcgcaggccgccagacggagggggccccagccaacccgaaaaccccccag

SEQ ID NO: 245411 - RNA, 55 nt, Homo sapiens
cgacaggaggagacaggcgagagaggaggacacgaccgcgcaaaccaacgggaca

SEQ ID NO: 245412 - RNA, 68 nt, Homo sapiens
gacaaggaaggagaagcgcaccaaacagagccagaaggaggacccacaggcagaaaacccccgggaag

SEQ ID NO: 245413 - RNA, 81 nt, Homo sapiens
ccgcagaccgcagaaggccggagacaccagcagcaggaggcaaagggaccccaagaaaccaaagggcaagagccgcagccc

SEQ ID NO: 245414 - RNA, 81 nt, Homo sapiens
ccggagaggagcagaaggagcaaaaggcggacaggcaggcacaccagcccggacacaacaagcaaaacagcgccgggggag

SEQ ID NO: 245415 - RNA, 44 nt, Homo sapiens
gacccgccgcgcgcgcacgcccagaacgccaacgaagccaacgc

SEQ ID NO: 245416 - RNA, 76 nt, Homo sapiens
aaagaggacacaaagaagacgcaagcaggccggaggagaacgggaggggccaaagggagagggacaacacacgagc

SEQ ID NO: 245417 - RNA, 109 nt, Homo sapiens
ccggaggagcgcaaaccgaaccggggagaggagcaagcaggccaggaacagagaacaacacagccacaaaacaagaggagcccaaaccggaaacagcagaaagaggaca

SEQ ID NO: 245418 - RNA, 62 nt, Homo sapiens
gcggcgacagccaggcccggaagcgagggcggccgcgccggcccagccccggcacaaagcag

SEQ ID NO: 245419 - RNA, 53 nt, Homo sapiens
agaagccaccgcaaaaagcagaagccccagaggagcccgaaacccccaggcgg

SEQ ID NO: 245420 - RNA, 80 nt, Homo sapiens
ccgcaagcaggcaaagacggcaaaagcacaaggaccgcggacagagacaacaccgagagagaaaaccggagaaagaaaga

SEQ ID NO: 245421 - RNA, 93 nt, Homo sapiens
ccgcccgcccgccggccgcggccgggaaggcgcagccggaccagcgaagcgcggcaaacagggaaaaaaagggcgacaggggacaaaaccaga

SEQ ID NO: 245422 - RNA, 54 nt, Homo sapiens
aaaaaccagccccagaaacaagcacacaaagggcccggaaacgccaccggacaa

SEQ ID NO: 245423 - RNA, 55 nt, Homo sapiens
gagaccgccacacaagagaagacccaccgaggaggagacgggaacggagcccccc

SEQ ID NO: 245424 - RNA, 78 nt, Homo sapiens
gagaccggccaccgcgaccaccccacaggaagcccgggagccacacacgacgggaagcggggccccagcaggaggacc

SEQ ID NO: 245425 - RNA, 51 nt, Homo sapiens
gcccaccgcccaccgagccggccggagcgcggcggagcaggccggggcccc

SEQ ID NO: 245426 - RNA, 79 nt, Homo sapiens
gcacgacagccgaggcccagcgcagcacccagaaaaacgagcccccgcggccagaagaaccagaagcgcaaagaccacg

SEQ ID NO: 245427 - RNA, 36 nt, Homo sapiens
gaggcgaagcgagaggacaggagcggagaaaaaaag

SEQ ID NO: 245428 - RNA, 76 nt, Homo sapiens
ggccgagcaagaccagccagcgccagcgcagcccggccgcgcaccgcccagcgagccgggcccgagggaggacgga

SEQ ID NO: 245429 - RNA, 81 nt, Homo sapiens
ccagcccccaggagcgggaacagaacacgcgagcacgcccccacagagggacccggaaggcgaggcaccccgagccggacc

SEQ ID NO: 245430 - RNA, 57 nt, Homo sapiens
ccaaggcagacaaggacaaccagcgagaggagaaccagagaagggaaccaagaaaca

SEQ ID NO: 245431 - RNA, 37 nt, Homo sapiens
cccgccaccgccaggccaggcagccagacagcaagag

SEQ ID NO: 245432 - RNA, 72 nt, Homo sapiens
gaagcacgacacgggggcccaagggaccacaaaacggaggagagagaagcgggaacaaagagcagacaggca

SEQ ID NO: 245433 - RNA, 77 nt, Homo sapiens
caaaggcagcggaggaaagaccacagcaagaccacgcccccagccgggggaccaggccgaacgacccggacacaaag

SEQ ID NO: 245434 - RNA, 79 nt, Homo sapiens
ccgcgacggccggccgcgccaccgcaccgccaccggcccgacccaccgacaaccccggaacgcgggcaaaaggccccag

SEQ ID NO: 245435 - RNA, 75 nt, Homo sapiens
gaaggcacagaaagcaccagaggaaggccaaaggccggaagaggcgcacaccccggccagggcggaacacaagga

SEQ ID NO: 245436 - RNA, 88 nt, Homo sapiens
ggccgagggcaaggcgccagaccaagaaagaaccaagagggagacaagggaaaaggaagacaaaaaacacaaggaaagaacccagaaa

SEQ ID NO: 245437 - RNA, 61 nt, Homo sapiens
gccagaacgggccaacggaggacgcgaacgggggagccggggcgacgggagagacacgcca

SEQ ID NO: 245438 - RNA, 80 nt, Homo sapiens
gccgaggcgaggccccaaggacaaggaaggaggcgggaccggggccccagagcacacccacagaggcagaccgaaaacac

SEQ ID NO: 245439 - RNA, 61 nt, Homo sapiens
ccggcgaggagcgccgcgcccgcccgaagacgaccccgacgcaggccaggagccgcggaca

SEQ ID NO: 245440 - RNA, 86 nt, Homo sapiens
agaggagagcagagacagacacaagcgggccaacaaaagcggcccagcaggagaaccagagcccggcgaggccggcagcccgagga

SEQ ID NO: 245441 - RNA, 84 nt, Homo sapiens
cggggacccagacccggagcccagggaagcagccgaccagccgcggagccgggggcagagccccaacggaaacgacgaccgagc

SEQ ID NO: 245442 - RNA, 70 nt, Homo sapiens
gaggaagcaacgagaaacaaaaaagcaaaaaaccagggcaagacagaaagaaaccaggcaccaaagggag

SEQ ID NO: 245443 - RNA, 64 nt, Homo sapiens
cgggacaccgcacagccgggaaaggaaacacgagccccaccaaagcaaaggccggaccaggaga

SEQ ID NO: 245444 - RNA, 36 nt, Homo sapiens
cgaagggggccaaaagaacagcaaaaacgaaaacca

SEQ ID NO: 245445 - RNA, 37 nt, Homo sapiens
ccgacagccgcagaacacacaacacgacaacaaacca

SEQ ID NO: 245446 - RNA, 56 nt, Homo sapiens
gaggcagaccggagccagaagcacagaccccaaacgacacccaaagccggaagcag

SEQ ID NO: 245447 - RNA, 80 nt, Homo sapiens
ccgggcccggccacagccgcagcggagcccacgagaggcagcgccaggcggagcagaccaccggaaacagaggaagagcc

SEQ ID NO: 245448 - RNA, 79 nt, Homo sapiens
gcgcgccaggcccggccaagcccaggcggcaccaggagcggagaagccagagaaacagcaagggagggaccagaacagg

SEQ ID NO: 245449 - RNA, 73 nt, Homo sapiens
aagacggcagcagcggggcacggaaggaaggaaaaaccagaacaagcagaagcacccaaaagagagaagaacg

SEQ ID NO: 245450 - RNA, 64 nt, Homo sapiens
gcggccgggggcccagcccgggcggcgcggccagggcggagaacggaaaagcaccaggaagcag

SEQ ID NO: 245451 - RNA, 79 nt, Homo sapiens
cgggagcgggcgcagaccaacaaacggccggcaccagaacccggaggcagccaccagacagggaaccccaccaccgacg

SEQ ID NO: 245452 - RNA, 87 nt, Homo sapiens
aaggacggcccaaacacgcccagaggaggggaacaggccggcgaacacaaaggaggaggggaggagagccaaccgagggagggaggg

SEQ ID NO: 245453 - RNA, 35 nt, Homo sapiens
caccgcacggaccccccgagccgcaaaccgggaac

SEQ ID NO: 245454 - RNA, 74 nt, Homo sapiens
gaaaaccaaaaagaagggagaaaaaaggaccagagccagacacgaaggccacaaagaaagcaagagaggaaaag

SEQ ID NO: 245455 - RNA, 68 nt, Homo sapiens
ggacaaggaaggaaacccaagacggcggcagagagaccaggagcacacagagaaccagaggcaaagaa

SEQ ID NO: 245456 - RNA, 80 nt, Homo sapiens
cgcgggcgccgggccaggacggacagagaagcagccaggccacacggagcagggcagggaggggagagcgaccaggccag

SEQ ID NO: 245457 - RNA, 82 nt, Homo sapiens
caccagcggccacaagcaaagagccccacccacgagcaccggggcgcacaagaccccacacagagggcccgggccccccagg

SEQ ID NO: 245458 - RNA, 76 nt, Homo sapiens
cgggaacccgccccgcccgaaaggaccccaacgcccgccgccgagcgaccaaagcagggcacccccgaaggacagg

SEQ ID NO: 245459 - RNA, 117 nt, Homo sapiens
ccagggccggccgggagcgaggaacgcggagaggagggagggaaaccgccccaggaggaagggacacacaaaaaagacgaggaccagagggagcagaaggccagaacaagaggaagg

SEQ ID NO: 245460 - RNA, 64 nt, Homo sapiens
gggcgcgagggcagaaccggccccaccaggcaaccgccaccgaagcaggggacccagcaccacc

SEQ ID NO: 245461 - RNA, 80 nt, Homo sapiens
agccgagcagccggcaacggcggggcgcccggagcccgagcccacaggacacaggaagggaaacagcaagcgcacaacag

SEQ ID NO: 245462 - RNA, 84 nt, Homo sapiens
aaggccggaaggaagggaaaccgggggccccggacaacccgagcagagccccagcccccagcagccgacaggaggcccgcaaga

SEQ ID NO: 245463 - RNA, 91 nt, Homo sapiens
cggacggcgccgcagcggcgcggcggcagcccaccgagagagcgcgggcacggaggagccagggaccacaccaccaccaccacaaccaaag

SEQ ID NO: 245464 - RNA, 33 nt, Homo sapiens
aaccggcacagcccccggaggagcgccgcaccc

SEQ ID NO: 245465 - RNA, 76 nt, Homo sapiens
gggggggcaaaagggcacccaagaagccaagcacggcaccggggccacccagcacgccccagggaaggaagagcgg

SEQ ID NO: 245466 - RNA, 75 nt, Homo sapiens
gacccagaggagagcccaaacagacgacgcaaaggagcaccgcacagaagcaacggccggaccagccaggaaaga

SEQ ID NO: 245467 - RNA, 73 nt, Homo sapiens
gacaagacaggggccggcaggcaagcggcagccacacccggagaaggagccgcccagggacgaagcacccagg

SEQ ID NO: 245468 - RNA, 77 nt, Homo sapiens
aggaaaaacgggaccacaccccggaagcacacaggcgcggggagcgccacaggacaagacgacggagaaggacaacg

SEQ ID NO: 245469 - RNA, 70 nt, Homo sapiens
gcggaaaggagggcggcccggaccgggagacacggccagacgcccccagggagaagcgagcagcacaggc

SEQ ID NO: 245470 - RNA, 67 nt, Homo sapiens
gaaaaccgggaagcacgaaagggacaggagggccaaaggaaccgcgccacagcggggacgcggaaag

SEQ ID NO: 245471 - RNA, 65 nt, Homo sapiens
agccaacggagggaggaggacgcacaaaacaggggaaaaagaaaagggcgaagacccgaagcagc

SEQ ID NO: 245472 - RNA, 82 nt, Homo sapiens
ggagggggcccgagccccgcaacaccgcggcccacgggacccccaggagggacccgcaggccaaaacagaagaggcaaagcc

SEQ ID NO: 245473 - RNA, 71 nt, Homo sapiens
gaagcacacacccgccccccccgcaggggcagcgacaggggccggccacagcgggggagacgcgaccgcgg

SEQ ID NO: 245474 - RNA, 53 nt, Homo sapiens
cacgcaggacgagcggccgaagcagcgcgacaccggccggaccaggaccgggc

SEQ ID NO: 245475 - RNA, 72 nt, Homo sapiens
gagaagaaagcagagagggaagcaaggagagggagccggcccaccaggacacccccccgacccgggaggggg

SEQ ID NO: 245476 - RNA, 74 nt, Homo sapiens
acaaagacagccacaggcgggaccagcccacacccaaggagagaagagaaaacccaggacaacccgaaaggcaa

SEQ ID NO: 245477 - RNA, 71 nt, Homo sapiens
gccagacggacgaggcggcggagaacaagcggcagccgacgaagacagccacacccccccagaacacaaca

SEQ ID NO: 245478 - RNA, 58 nt, Homo sapiens
cggccgcgggagacggaacacccccacgcgaaaaggccaaagagcaagccaaccaagc

SEQ ID NO: 245479 - RNA, 55 nt, Homo sapiens
gggagagagaaaaaccggacgagcgagcaagcagcagcagaggaaaaaagagacc

SEQ ID NO: 245480 - RNA, 72 nt, Homo sapiens
ccaggagcccgagagagaaggagcaggaggagagccagagagaggaagccgaaaacacccgcaaccagacag

SEQ ID NO: 245481 - RNA, 79 nt, Homo sapiens
cagcaccacagcccgcagccccgccagccacccccaggcgagcccagacaccagaagcgaaggagaaggcggggagaac

SEQ ID NO: 245482 - RNA, 72 nt, Homo sapiens
gggcagcgcgcggcccgggcagcagccagccaagagaggaggagagaaggaacgcagaagccaggcccaccc

SEQ ID NO: 245483 - RNA, 80 nt, Homo sapiens
ggaaaggggacaggccgcgcggccccgggggccagccccgagccgagcggcacacccaaccgagcagcggccgagggcca

SEQ ID NO: 245484 - RNA, 82 nt, Homo sapiens
gcggggccgggcccccggccgcaagcagcgggaagcacaggagagcaggcacgaccccagcggcaacacggggcgaccggac

SEQ ID NO: 245485 - RNA, 61 nt, Homo sapiens
agagcagcaccaggccagagccagaacagccacaccacgccccgagccacacaagacccaa

SEQ ID NO: 245486 - RNA, 57 nt, Homo sapiens
gcaaggaaagacagaaggccaaagccaccccaggagcgccaggaaagccaagccagg

SEQ ID NO: 245487 - RNA, 49 nt, Homo sapiens
caaagcaacccagaccaaggaagaggcgaacaagcccaccaacacccca

SEQ ID NO: 245488 - RNA, 65 nt, Homo sapiens
agccagccccagacacgggcgacacgaacaacaagcagaggaccaaagcaggcccgcgcgggagc

SEQ ID NO: 245489 - RNA, 69 nt, Homo sapiens
gcagagaaaccaaagaaacagaaaaagaaaacaccaaggggagcgggaagaagaagcgggggaccaaga

SEQ ID NO: 245490 - RNA, 50 nt, Homo sapiens
cgagcaggcacgccgagaccccgaggcgcgccccagccagccccgccagc

SEQ ID NO: 245491 - RNA, 83 nt, Homo sapiens
cgccccgcgccccggagcaggccaagcggggccaggacgcgggaggaccgggcggagaacggaaaagcaccaggaagcagaga

SEQ ID NO: 245492 - RNA, 50 nt, Homo sapiens
agcggcaaaagcaagagaacagggcggcacaaagagagaaaaccaggaaa

SEQ ID NO: 245493 - RNA, 86 nt, Homo sapiens
gcggaggccccagggaagcgcagaaagcaggcgaacccgcggcgcaaaacggagggccgagccagcccggcgcagaaagaggagcg

SEQ ID NO: 245494 - RNA, 78 nt, Homo sapiens
agcacgcacggacacccgagcacagagacgaagaggaccaggagcaaacagaagggaacggcgagggaacccaggaag

SEQ ID NO: 245495 - RNA, 69 nt, Homo sapiens
aggaaggcacggaggcacacagaaccacaggaaagcagcgaggaacacaggcaccgacaacgcaaagga

SEQ ID NO: 245496 - RNA, 79 nt, Homo sapiens
cagcagggaggcgggacgcgggaaacccccaaagagaaagaagaagaaaacgagacccaaaagggagaaagaagagaag

SEQ ID NO: 245497 - RNA, 85 nt, Homo sapiens
ggcgaaaagaagaacaaacgacgcagagaagcgcaccaccaccgccggcgagcaccaggagagcccccaggccgcacccggcaac

SEQ ID NO: 245498 - RNA, 74 nt, Homo sapiens
acccgccagccacccaacaaccagcaccagacccgcgaccgacagcccccagcccccccagccgcagggagccc

SEQ ID NO: 245499 - RNA, 62 nt, Homo sapiens
aaagcaagcaaaggacaagacaccagacaccacacacaaggggagccaacagacagacagcg

SEQ ID NO: 245500 - RNA, 80 nt, Homo sapiens
accccagggagccggaggcgggcgcgccccaccaccgccccaccagggcgacccaccaacaggcaacccagacaaagaag

SEQ ID NO: 245501 - RNA, 78 nt, Homo sapiens
cgggagaaacccggacagggcaggagacggaagggacaaaaggacgcgaaaagagaaagagaagcaaagagaaaaaca

SEQ ID NO: 245502 - RNA, 72 nt, Homo sapiens
agggagcgccgccagcagccagaggacaaaacccagccggcacaaaccaggaaaggaagccggagcgggggg

SEQ ID NO: 245503 - RNA, 80 nt, Homo sapiens
gcgggagcggaggagcgcgccggagaacgacaccaagcgcgaaaagcagggccgacgggccggggggagcggacaccggg

SEQ ID NO: 245504 - RNA, 71 nt, Homo sapiens
cacaacaccggcaggaaccaccaggacagagaaacaaccacggaacaacagacagccacgacggggcacga

SEQ ID NO: 245505 - RNA, 79 nt, Homo sapiens
cgcgcacgagcccacgcccgaccccggcgcacgccaggcgaacccaggcacccagagacggagcggaaaccaaggaaga

SEQ ID NO: 245506 - RNA, 77 nt, Homo sapiens
ggaaagagaaaccccaagccaaagggaaaaaaaggaacggaaccgaacagaagaaagagaagaccccaaggacagca

SEQ ID NO: 245507 - RNA, 77 nt, Homo sapiens
agcagcacaacaaacacggccacagagaagaaccgcaaaggaaaacagccacaggagcaggcaggaaacagaaccag

SEQ ID NO: 245508 - RNA, 78 nt, Homo sapiens
aagaagggaaaaaaagaagagaaagagaaccaggaggcgcaaaaaaagaggcccccagggaaacgaggaagagaggcc

SEQ ID NO: 245509 - RNA, 73 nt, Homo sapiens
cagccagaagaaggaccggaagcacacaacaggaaaacaaaagaggagaaaggggcaagacgccaagagaaaa

SEQ ID NO: 245510 - RNA, 82 nt, Homo sapiens
ccgacgacccggaccaagaaggggaggcccgcggcagaggcagcagcaaggggggagcgccaggagcaccgcaggaagagcc

SEQ ID NO: 245511 - RNA, 57 nt, Homo sapiens
gggggaggcggcaagagggaagagagccaacggcacgcacagcggcacagagacgag

SEQ ID NO: 245512 - RNA, 76 nt, Homo sapiens
gggaggaggggcaggcccggcgggaggcaaaggcaggaaaagcgagacaacccagagagaagaccgagccacccag

SEQ ID NO: 245513 - RNA, 73 nt, Homo sapiens
gcgaaccacccacagaccagccggaacaagagacccgacggggcgggagcgcgcccacgagacaccgaaccag

SEQ ID NO: 245514 - RNA, 69 nt, Homo sapiens
cagaggagaggaggagggaggggaaaaggaggagggaggggcgccgggaggcccgcccgaaaacaccca

SEQ ID NO: 245515 - RNA, 52 nt, Homo sapiens
gggcgcagcggggacgcggacgcacgagaccgaaggagcagacgaggcacga

SEQ ID NO: 245516 - RNA, 81 nt, Homo sapiens
gaggccagcgggacaagcggcccaggacgagcaccaccggaaggaaggcgagggacgggacaacccgcagaggcagggacc

SEQ ID NO: 245517 - RNA, 40 nt, Homo sapiens
ccaggacaccggaaccgggaaaggaacgacagaacaacaa

SEQ ID NO: 245518 - RNA, 75 nt, Homo sapiens
cgcccagcccccgagggcgggaacaggaaacgaaagagcccagacacccaagagggccaagccagaaaacagaaa

SEQ ID NO: 245519 - RNA, 66 nt, Homo sapiens
ccgcaaagcaaaaggggaaaagcaggagagaagaagagcccccaagcaccacggagggggagagca

SEQ ID NO: 245520 - RNA, 78 nt, Homo sapiens
gccgaggggcacaccagaacaacacaaccaagacacccaggagaaagacagcggggaaaagaaaaaggagggggcaaa

SEQ ID NO: 245521 - RNA, 68 nt, Homo sapiens
gcagaggcgaagggcacgcgccagaaaagccggcagagaagcgacagaaaggccagccacggaacagg

SEQ ID NO: 245522 - RNA, 107 nt, Homo sapiens
ccccacccgcgggccgcggcgcccggggaaagccgggccccgagggcggaccgagcccgagagagacgcagcgcaaggccgggggaggccacaaaacaaagcgacag

SEQ ID NO: 245523 - RNA, 48 nt, Homo sapiens
acgaacaggcgggaaggcacggggccaaaaaggcacgagggaacggga

SEQ ID NO: 245524 - RNA, 86 nt, Homo sapiens
agcgacgccgccgggcccaacggcgggccccggcgaggcagcgcggccgcagcagcccccccaccaggcggggaagagccaagacc

SEQ ID NO: 245525 - RNA, 73 nt, Homo sapiens
ccccccccggacagaaggccggccgggacccgaggcgagaggcgcggcgaccaggagcgccgaaaacaccacg

SEQ ID NO: 245526 - RNA, 107 nt, Homo sapiens
gacaccgcacgcgcacggacggcacagcccgccgaacccgaaaggaggcgcaagaaagcgaagagccacgaaaagcccaggggaaaaagggaggccacgggagcgaa

SEQ ID NO: 245527 - RNA, 78 nt, Homo sapiens
cacccaggagagaccgaagacccacgcagccacccagcccagcaccacgcgcagccaggaggcccgggaccgggggcg

SEQ ID NO: 245528 - RNA, 75 nt, Homo sapiens
gggacaaaggagaaacagagacaccccagaaacaggacgaggaaacaccaacaccaaaccagcccacacaggaaa

SEQ ID NO: 245529 - RNA, 51 nt, Homo sapiens
agaagaaagagggcgccaggagaggagccaagcccaacgggacgggaaaac

SEQ ID NO: 245530 - RNA, 83 nt, Homo sapiens
aacagcaagaagaagagcccagcagcacccgccccccagccagccccccgccccccccgcagcgcgcagagcccggccaagaa

SEQ ID NO: 245531 - RNA, 75 nt, Homo sapiens
gcgcccgcggccggcccggcggagagggggcgacccagcaacgcggccggccaggggcaagcgagcacggaggga

SEQ ID NO: 245532 - RNA, 67 nt, Homo sapiens
acccaacaaacgcgcgcggaggcggcgacacgcaaaaggaggaggccgcggagcaccacgcacgcac

SEQ ID NO: 245533 - RNA, 68 nt, Homo sapiens
ccaccagcacggcagcaaagggaccgacagcaagaaaaggagaaaacaaggccgcgggcacacagcaa

SEQ ID NO: 245534 - RNA, 76 nt, Homo sapiens
gccgggcccccagccgacagccagggcggaagcccgccccagagcaggcagacagccacacacacccccgccggcg

SEQ ID NO: 245535 - RNA, 79 nt, Homo sapiens
cagccggaaaggaaaaagacaagaagagcaccccggggaaacaaagcccgagcagcccggaccacccagcagccagacg

SEQ ID NO: 245536 - RNA, 79 nt, Homo sapiens
aaaagacaaggggaggacagcggaaaaaccggagacgccaaaaaggggggccccgaagccacgaggaagccacacaccg

SEQ ID NO: 245537 - RNA, 69 nt, Homo sapiens
cccaacgagagccagaggaccaggccaagccgccacaacagcagcaggcgcaaaaacgaacccacaacc

SEQ ID NO: 245538 - RNA, 84 nt, Homo sapiens
ccaggcccagccccgaagggcacaccggaggaaaacaaagagggaaaacggagaaaagcccccccaggccagcgcaggaacacg

SEQ ID NO: 245539 - RNA, 71 nt, Homo sapiens
gaaaacaaaggaaaagaagaagacggaaacccagaggcccgaccgggggagacggcaggggccggccaccg

SEQ ID NO: 245540 - RNA, 77 nt, Homo sapiens
gacagcagcagggacaagaaaggagaggccgaaggagggaccgccccccgcgcggccgaaagcagccagcaagaaaa

SEQ ID NO: 245541 - RNA, 89 nt, Homo sapiens
cggcccccgccagcacacaccgagcagggcaccggcacagacagaagcgcggccccgccagcccgagacccaccggacagcccgccacc

SEQ ID NO: 245542 - RNA, 68 nt, Homo sapiens
agcaaaccgggccacaggcacggggccacaccgggggagggcacaggagagccagaggaagaaccaga

SEQ ID NO: 245543 - RNA, 60 nt, Homo sapiens
caggagaacgaaacggagccagagaaggcagaaggaaagcgcaggcaggagaaggacagc

SEQ ID NO: 245544 - RNA, 78 nt, Homo sapiens
aggcgacgggccaagggacagccggcggacaccccaccaggagacgcagcccaaacagacaaagccaaacaggaggca

SEQ ID NO: 245545 - RNA, 75 nt, Homo sapiens
agccggaagggcggggggcgggccggaggggagacgggaggcaggccaacaggcagagaggccagaccagggggg

SEQ ID NO: 245546 - RNA, 52 nt, Homo sapiens
gcccaggcaggaaccaccaccacagacccagacagcagagaaacagaaaaca

SEQ ID NO: 245547 - RNA, 81 nt, Homo sapiens
cggcgcgcgcgcagcgcaggggaggaggacgccccgcccccggagagggaacagaagggaggaaacaaaagaagcagcagc

SEQ ID NO: 245548 - RNA, 57 nt, Homo sapiens
gccagaaccaacccacaccagaaaggacacacagggggggccgcccgcccaaggcag

SEQ ID NO: 245549 - RNA, 81 nt, Homo sapiens
gagccgcgaggacacgggcgcaaccgcagcacacagcgaccgggagaacaagacggaaagcagaaaaaggcccggaagaca

SEQ ID NO: 245550 - RNA, 121 nt, Homo sapiens
gaaaaacacaaggaaacagccccgagggaaaggccagccgggagaagacccccacaaagacacacagagacaaccgccaccgggccgcccgggaagagccaccgcaaccacaccggccgga

SEQ ID NO: 245551 - RNA, 79 nt, Homo sapiens
ggacggaccgccacgcgcccgggagacgcccgcgccgccggggaacgcccgcggacggcagggcgcgacaagaagcgcc

SEQ ID NO: 245552 - RNA, 75 nt, Homo sapiens
ggaggcccagccagaacgagcggcccaaaagacggcggcaagcaggaaacaacggcagaccacacgggaggagga

SEQ ID NO: 245553 - RNA, 87 nt, Homo sapiens
accgcacaggccggagagagccgaggcaggaccccgggacacccggaagccaggaaagcggccccgacaggaacaagcaggagacca

SEQ ID NO: 245554 - RNA, 89 nt, Homo sapiens
agcgcgaggaggagccgaagcccaaaaagcgaaggggaggcgccgcaagcgcgagcagcgcacccacaccagaaagcggcgggcacagg

SEQ ID NO: 245555 - RNA, 51 nt, Homo sapiens
cacggcacggagcaacgggccgggagccaagggcagggggggccgagccag

SEQ ID NO: 245556 - RNA, 87 nt, Homo sapiens
aaaaggacgagacgcgagggcacagacggacaacaggaaaaacccagccagcgcagaaccggccgaaaagcacaaacagcaagaaag

SEQ ID NO: 245557 - RNA, 62 nt, Homo sapiens
cggacgggccccgcggccgcccgagcaggaggacgaacagggcgaacacacacaaaagggac

SEQ ID NO: 245558 - RNA, 79 nt, Homo sapiens
gagccaccaccagaacggaggcgccccgacaagggaccgggcgggccccgcaggaaacccccaccggcccacacagacg

SEQ ID NO: 245559 - RNA, 81 nt, Homo sapiens
ggacggaccgagaccggaccgagagcggaccgagagcgcgaaacgcacgagaaggaccaccaaccacaaggaaaagacaga

SEQ ID NO: 245560 - RNA, 73 nt, Homo sapiens
agaagggaaaagcgagaaagcgcgcaaagaaacgaacaacgcgcaaaaacaagggaggcgaggacggacaaaa

SEQ ID NO: 245561 - RNA, 77 nt, Homo sapiens
acaaaagggaaaaccaggagcaagacaaaaaaaaccgagaaaacgggacaaagagccagcccgagcagcacccggcc

SEQ ID NO: 245562 - RNA, 80 nt, Homo sapiens
cgagccagccgcggccggaggagcccccaggccagggcgggaccggagaaaacgaaggaggacccccccacaacaccagg

SEQ ID NO: 245563 - RNA, 57 nt, Homo sapiens
ggaacagacgcaggaaggccaggggccaaggcgccaaaggcccagcccagagacacc

SEQ ID NO: 245564 - RNA, 69 nt, Homo sapiens
accagaagcacaaggacagagcacccaccacaggagagaaggagaaggcacgaggagagaaaaaaacga

SEQ ID NO: 245565 - RNA, 69 nt, Homo sapiens
acgaggcccccccggagcggacagacccccaggccccaggcacgaaaagacagcagggggagcagcaaa

SEQ ID NO: 245566 - RNA, 52 nt, Homo sapiens
aacgggaacgggacacaccacaggaagagccggaggagccaccaacagaagc

SEQ ID NO: 245567 - RNA, 56 nt, Homo sapiens
ggccgaacgcggaccgccacccggagggaggcggagcgggcccacacaagaacaca

SEQ ID NO: 245568 - RNA, 69 nt, Homo sapiens
cacccacccgcgcggccaggagcgcccaggaaacaaggccgacggcgagaccccacgggccaccaaccc

SEQ ID NO: 245569 - RNA, 55 nt, Homo sapiens
agcacaccaagcgcagccccagacagggccccggcccgcccggaagcgcagcagc

SEQ ID NO: 245570 - RNA, 76 nt, Homo sapiens
cacgcaagcacaagaaccacccggccggggcaccaaaagggcaagcgaagaagagcaaacgagacggaagaaaaaa

SEQ ID NO: 245571 - RNA, 74 nt, Homo sapiens
gagacaccccgggggccccgagcaaaccagggagaaaagaaagccagaaggaaggaagcaacgaaccaagaaaa

SEQ ID NO: 245572 - RNA, 97 nt, Homo sapiens
caagaagaagcggcgacgcgagaaggggcgggagcgggaaccagcggaggacaagaacgcaaagcccccaagagccagccaggggaaaggagggaag

SEQ ID NO: 245573 - RNA, 57 nt, Homo sapiens
ggaaagacaggaaaaccaacccaagacgcgcagagacgcaagcggaagaacagcgca

SEQ ID NO: 245574 - RNA, 71 nt, Homo sapiens
gccgcaccagaaggggacgccagacgccaccgcagcaccccagggaggccgcaagacagggccacgcaccc

SEQ ID NO: 245575 - RNA, 106 nt, Homo sapiens
gaagacccacgaccccagagggcagaaaggcgagcagcaggccaagcaccggcagccagacggggggcagccgcacaaggccggccgcgggaccccagccgcccac

SEQ ID NO: 245576 - RNA, 81 nt, Homo sapiens
agcggaaggagccagccacaggcggcggaacggaacagaagcaaggccaggcagacagcagagcacccaaggaaaagcagc

SEQ ID NO: 245577 - RNA, 94 nt, Homo sapiens
ccccgagaccgcagccccgccccacgccggcagccccacgaggaaacgaaggcagcaaaaagaagagcagaaacgaaggaaaaggcgggaagag

SEQ ID NO: 245578 - RNA, 54 nt, Homo sapiens
gaacaaagacggagagcccagagacacggcagccgaaggaggccggacaggggc

SEQ ID NO: 245579 - RNA, 69 nt, Homo sapiens
gaacacacccagaaccaacagcacggggcaaagacgcaaagccaccgcccaggcggaggcagcccgacg

SEQ ID NO: 245580 - RNA, 61 nt, Homo sapiens
gggcgcgagccgggagccagagaagcacaaacaacaaaagagggcccagaccaccaacagc

SEQ ID NO: 245581 - RNA, 58 nt, Homo sapiens
gcggcccccagcgggagcgggcaccggccacacggagagccgagccacgcgcccaggc

SEQ ID NO: 245582 - RNA, 57 nt, Homo sapiens
acaggccgcacaaaaagaagcagggcgagcgcgagcagccgggaacgaggccaacaa

SEQ ID NO: 245583 - RNA, 73 nt, Homo sapiens
gccgcaggccaccgacacgagacaaccgggagccgggagaagcaaaaagccacgagggacacaaggccagcag

SEQ ID NO: 245584 - RNA, 64 nt, Homo sapiens
acaccccacgaaggcggcaccaagacaagacgaggggggaacccagaggaggagcgccgagcga

SEQ ID NO: 245585 - RNA, 99 nt, Homo sapiens
agcgcaaccggggagaagagggaccacaaggcaccaagcgggggggggaggcaagcaggggggcaaaggaaagaaggcagaaagggaggccaggagcgc

SEQ ID NO: 245586 - RNA, 79 nt, Homo sapiens
gggagcgggcaggaccgcggacggaagcaccggacgaagaaagaaccacagaaaacaacagagacaaacgccaccacag

SEQ ID NO: 245587 - RNA, 61 nt, Homo sapiens
ccaaaagagccaagcccagagaaaacccgagaggagcaggagcaaccgacaggcgggccgg

SEQ ID NO: 245588 - RNA, 85 nt, Homo sapiens
gccgcggcagccacagcaccgagacccggggcccggagcaggaaaacaacggagcacgcaaagcaagccggcaacgggacaagca

SEQ ID NO: 245589 - RNA, 103 nt, Homo sapiens
ggaccggccgagaggaagacgagccgggaggaacggcccggaaacaggaggacggcggagaacggaaaagcaccaggaagcagagaggaccgcagaagggaag

SEQ ID NO: 245590 - RNA, 62 nt, Homo sapiens
gccggcgcgggaaacgggcgaagcgacgagccgcgaggagcaaaagggagaccacaacagcc

SEQ ID NO: 245591 - RNA, 84 nt, Homo sapiens
ccggaggaagaaagccaaggagggaaaggcagacacaagacgagcacccccgagaaaagaaagagacaggaagagaaccgagaa

SEQ ID NO: 245592 - RNA, 64 nt, Homo sapiens
ccagaagagagccgggcgccccacaaagggcgaagcagcacggaacaagagacccaggcacgag

SEQ ID NO: 245593 - RNA, 76 nt, Homo sapiens
cgccccaccgcgggcgccaaggggagcagaaggaccggacacaggagaagacagaggagccagaccaagagacagc

SEQ ID NO: 245594 - RNA, 79 nt, Homo sapiens
gaacagccccacaccggggaccgcggaagggaaggaaaaaccgagggaaccaccaccagaggacaagacaaagggagca

SEQ ID NO: 245595 - RNA, 78 nt, Homo sapiens
gaaaggaaggaaaaccgacgaaccgcacccaccagaaccgggcaggcaagacgcgccggccaagggacagcaggagag

SEQ ID NO: 245596 - RNA, 74 nt, Homo sapiens
gcagccagaccaagaacaaccgcggacacggagaggaagggcgcacagcgcaagcagacgccacaagaacaacc

SEQ ID NO: 245597 - RNA, 77 nt, Homo sapiens
aaagccggggcccgagaaacgcaaaaggaggccaggaaggaaacagccaggaggagagaaagaacccacgcaggacg

SEQ ID NO: 245598 - RNA, 77 nt, Homo sapiens
aaagaaccgagaaggcgcaaaagggacagacaccagacgaaaaaacgggaggcgagaagagagaagaggaagaggaa

SEQ ID NO: 245599 - RNA, 77 nt, Homo sapiens
aagccgaggagaagaagagaacccacagagccccagaggacgacacaaaggggggagagagagaagcaccagaagca

SEQ ID NO: 245600 - RNA, 58 nt, Homo sapiens
ggcgagcgcagacgcggggccaggggccaagccccaagaagaggagagcaccaccccc

SEQ ID NO: 245601 - RNA, 71 nt, Homo sapiens
gaagcggcaagagcggaagcacgaaaaccccaggggggggaagacaacccggagaacacccaggggacgcc

SEQ ID NO: 245602 - RNA, 60 nt, Homo sapiens
gaaaaggcaaggcacaacgccacgaggcacaccccagcaaggaccccgccccccccacca

SEQ ID NO: 245603 - RNA, 41 nt, Homo sapiens
gcccccgagagcggaaacaggaaggacccacaagaccaagc

SEQ ID NO: 245604 - RNA, 76 nt, Homo sapiens
caggagccaagaccacagcagcacccagcacacaggacaggccccccagccaccagcggggcccacaggagggcac

SEQ ID NO: 245605 - RNA, 77 nt, Homo sapiens
ccaacgggcccccgagacaagcacccccgcgagggaaagaacgccggacaacagcggcgaagaaggcaaaccgaagg

SEQ ID NO: 245606 - RNA, 98 nt, Homo sapiens
cagcagagagccgggccagagccaggggccgggagggcgccaggaaggccccagggagaaagcagaaggagagcaaagagcacacgacggaaagaagc

SEQ ID NO: 245607 - RNA, 71 nt, Homo sapiens
acaacgcgacaaaggagagaaacagccaaaacagcacaacagcggaagagggagaaccgcacgcggaaagg

SEQ ID NO: 245608 - RNA, 69 nt, Homo sapiens
gagacgagccagacagacaagcaggggggagaaccagaacaccaacagaagagcagagaaccagagccc

SEQ ID NO: 245609 - RNA, 79 nt, Homo sapiens
cgcgcgccggggaggcgccggagcgccgcggggcccggacgggaagaccccagaaaaagaaagagcacgaacgcggaga

SEQ ID NO: 245610 - RNA, 78 nt, Homo sapiens
aaaggcgcgagagaaggagaagagcaaacacccggaagacagcaaaaggcaggagccaggaaaccgcagcaccaaaac

SEQ ID NO: 245611 - RNA, 63 nt, Homo sapiens
gggggcggcccggccccgcaggacccagcagccagcgaagccccaaggaagccgggacgccca

SEQ ID NO: 245612 - RNA, 68 nt, Homo sapiens
gcaaccagaaaaaagaaggacaagacaagagaaccaccgggaccacagacacacggcagggaacccca

SEQ ID NO: 245613 - RNA, 67 nt, Homo sapiens
aggcagggccaggaacaacgcaggcaccaaaccaaaaccgcagagagggcaaacgccagagagaacc

SEQ ID NO: 245614 - RNA, 58 nt, Homo sapiens
gggcaggccgcccccgaagagacccaaaaaggggacagcggcggacaacccgcggagc

SEQ ID NO: 245615 - RNA, 72 nt, Homo sapiens
aggaaaaaacgaagggacaggccccggaacaagaggaggacagaaccaggcgaggaggaagggggaacaaag

SEQ ID NO: 245616 - RNA, 79 nt, Homo sapiens
gaggcagaagcggcaccaccgcgaggccagaccccaaagacagacggacaggaagagcacccaagcgcaagcaaaagaa

SEQ ID NO: 245617 - RNA, 43 nt, Homo sapiens
cagagggaggaagacagccagcaagagccaggaacaaaagggg

SEQ ID NO: 245618 - RNA, 68 nt, Homo sapiens
agccgggccgacaacaaaggagagccccaagagcccaagaacccaacaagggccccagaagacacaga

SEQ ID NO: 245619 - RNA, 66 nt, Homo sapiens
cggcaagagagcccaaggccgcaacaggaagcccagaggcacggggcagaacaccaacagagggcc

SEQ ID NO: 245620 - RNA, 71 nt, Homo sapiens
ccagaagaccagaagcgacagcagcgggagagaggagagcagagagcagaaacaccgaccacccaacccca

SEQ ID NO: 245621 - RNA, 51 nt, Homo sapiens
agcaggggcccacacccccggcacccccacagcaagccccgcaccaccaac

SEQ ID NO: 245622 - RNA, 75 nt, Homo sapiens
caagacaccgagacaggaagcggaacccagacaggcacagaagagagagaaagaggagaaccaacagacaggaga

SEQ ID NO: 245623 - RNA, 55 nt, Homo sapiens
cccggaaagaagagacacagaggagccacacccccaggaagcacaaacaccagcc

SEQ ID NO: 245624 - RNA, 71 nt, Homo sapiens
gaggccgaaacgcagcgcgcccccaggaggcgagcccgcggaaccgcagccagggaccaggaggagaagca

SEQ ID NO: 245625 - RNA, 64 nt, Homo sapiens
cgagccaaagggccggagcggaagaccaccaaaagcaggaaaacgagacggcggaagcgcaaga

SEQ ID NO: 245626 - RNA, 81 nt, Homo sapiens
gccgccgccgccgccgcgccgcgccgcgccgcaccccgagcgaccgaggggggcgggccgagcacccgcaggccccgcaga

SEQ ID NO: 245627 - RNA, 58 nt, Homo sapiens
ggcagccaagaaacgcacaggagacagaggaccgggcacgggcagaaggccagccgac

SEQ ID NO: 245628 - RNA, 48 nt, Homo sapiens
agggccaaagaagggagagagacagacagaaagcgcccaggacaggac

SEQ ID NO: 245629 - RNA, 63 nt, Homo sapiens
gccagaaggcacagacaggggaaagaccacccaggcggggcggcccaggaaagacccaaccca

SEQ ID NO: 245630 - RNA, 86 nt, Homo sapiens
gcgggagcccacaccaccgccaggcccccggcccccccagacccacccccagccccacgggccaaacacaaacgccgacacccacg

SEQ ID NO: 245631 - RNA, 78 nt, Homo sapiens
ggcaggacaacacaggggggggggggagcagaaaagaggcacagagagaagaaggacagcgcagaaaaaagagaccca

SEQ ID NO: 245632 - RNA, 70 nt, Homo sapiens
aggaccaaggacgcagggcacaggaagcgacacagaacggggaggggccacccagagcacaacaggacac

SEQ ID NO: 245633 - RNA, 58 nt, Homo sapiens
agagaaagcaggccacgaaaacacaagacagaagccaaaacaggaaccgaaaggccaa

SEQ ID NO: 245634 - RNA, 64 nt, Homo sapiens
cgaaccccgggcagcccgggaaacccaagcagaaagaaaaccagacgagagacagaagacgaaa

SEQ ID NO: 245635 - RNA, 81 nt, Homo sapiens
aaggagcaagaccaaggaagcaacaagaccaagggggcagcccagaaaagaagcaaaaaacgggccccagggaggaaacgc

SEQ ID NO: 245636 - RNA, 79 nt, Homo sapiens
gaagccgggaggcccgacaccaggccggaagaaggaacaagaacaggagcaaaagaaggggaagaaccccacaggccag

SEQ ID NO: 245637 - RNA, 80 nt, Homo sapiens
ccccgcggcccagagaacccacagccgagaaaaagcggggaaaacaaaaaaaagaaggagggaagagggggccaggacca

SEQ ID NO: 245638 - RNA, 77 nt, Homo sapiens
ggggggcgagcccgccgcacccgggccgcgccggcacgaggcaaggaggccacggggccgaagacaccaaccgggca

SEQ ID NO: 245639 - RNA, 75 nt, Homo sapiens
ccggggggaggaggggcaggcccggcggaaggaggcagaaagggagccccaagagagagggccaagccaaccggc

SEQ ID NO: 245640 - RNA, 75 nt, Homo sapiens
accgccaaagacaagaacagaggggccgagaagccaacaagcccgccaagcgcccccgggcacgagagcggacga

SEQ ID NO: 245641 - RNA, 67 nt, Homo sapiens
cggaaggaaaagcggccgcagggcaggaaaccaggcgcagcccacagaaagacagcccacccaaagg

SEQ ID NO: 245642 - RNA, 127 nt, Homo sapiens
cgacggacggcagcggccaagcaagaagaaagacgggcagcaagcgggagcggggaaggcacggcgccgagccgcgccgccaggaggccgcgccgggcgccggcccggggagggagcgccgggggag

SEQ ID NO: 245643 - RNA, 74 nt, Homo sapiens
gggcgcgggcggcggcgccggcaggaaggggcaacaggaaaacaacccagagaacccaaacccccagacaagac

SEQ ID NO: 245644 - RNA, 45 nt, Homo sapiens
agaggaggagcgcagcccggcccggagagccggagaggaggaagg

SEQ ID NO: 245645 - RNA, 78 nt, Homo sapiens
ccaaccagaaaaccccacgcgccagaaccacccaacagagagcgaccaaacccccacaacaaggacaaagggacccaa

SEQ ID NO: 245646 - RNA, 97 nt, Homo sapiens
acagcggacgggcggggcacacaggaggcaccggaaagcggagcaccggacaagcaccagagcccagagcaggcccagacggagcggacagacggaa

SEQ ID NO: 245647 - RNA, 78 nt, Homo sapiens
aaaagaccggccgggaaaacaaacaagaagaacagaaacaagggcagagggggaagaaggagccgaggggagaaaccg

SEQ ID NO: 245648 - RNA, 82 nt, Homo sapiens
gagacacacggcacacaccagcaggcgcagaacgagggacaaggaaaccagacgaaacaacagccaaagacaaacagcacaa

SEQ ID NO: 245649 - RNA, 82 nt, Homo sapiens
acggggccgcccgacgacgcaccgccggccgccacaaccggagaaggccaagggccgggcaagacacgccagcgggccaccg

SEQ ID NO: 245650 - RNA, 81 nt, Homo sapiens
gcccacaagcggcgccgcgccccggccgcacggagggaacaagagggaaaacaaggaaacaacaaagaaggaaagagaaga

SEQ ID NO: 245651 - RNA, 78 nt, Homo sapiens
gcaccagagccagggcgcaggagcagcagcacagagagcccgagggaaaagacaggcaacaggaaagcaagggaaggc

SEQ ID NO: 245652 - RNA, 65 nt, Homo sapiens
ggcagaaagagggaaaaaggaggagacgaccagggccaaacgaccaggagcaaagggaagaccac

SEQ ID NO: 245653 - RNA, 106 nt, Homo sapiens
cgcgaaggccgggacccggccccggcccacaggggggggcaaacccgagagaacggaggccggaagagcgggagcgggagccaggcagaaggccaaccaaccccag

SEQ ID NO: 245654 - RNA, 64 nt, Homo sapiens
gccgggaggacacacacagcgccagaagcaccacggaaaccaggagaccaggcccaggaaggaa

SEQ ID NO: 245655 - RNA, 69 nt, Homo sapiens
gcgagggaggagagagggagagccaaagaagcggagaccagaggcccacggccaacagcccagaccaca

SEQ ID NO: 245656 - RNA, 43 nt, Homo sapiens
gcgggcgcgagggcagaaccggggcaagagcgggagaagacaa

SEQ ID NO: 245657 - RNA, 56 nt, Homo sapiens
ggccagcgacgccaggaagaaaacgggcacacgaaaagcagcagccagagcaaacc

SEQ ID NO: 245658 - RNA, 72 nt, Homo sapiens
agaggagggagaacaagacgaggaacaaaaacagcaaagccggccagacaaggagagcaacacaaggaagca

SEQ ID NO: 245659 - RNA, 73 nt, Homo sapiens
gcgagaagagaagggaagaaaacccgcccagcaagcaggacacgaccaacaagaaccacgagaggacaacagc

SEQ ID NO: 245660 - RNA, 38 nt, Homo sapiens
gaaagacccacaccaagaggacccagaagaaccacgcg

SEQ ID NO: 245661 - RNA, 78 nt, Homo sapiens
caagcggggagcgcccgcgacagaggagggaggaaaacaaccgagggcagacaccccgcggagccccagagaaaccag

SEQ ID NO: 245662 - RNA, 83 nt, Homo sapiens
cgcgagaccgcagaaggagcggagcggcagcagaaggagagagaaaacgccggcacagagcaagaaagaaagccaacaacagg

SEQ ID NO: 245663 - RNA, 70 nt, Homo sapiens
gacaggacacagcagacagacggagaacaagaaggaagaacgagacgccaaacaagaagaaggaaccaca

SEQ ID NO: 245664 - RNA, 84 nt, Homo sapiens
cccgggagcggcccgcaccgggggagacgcgggcccaggcggacagaaggcaagcagcaaggaacaaggaaagagcgaaggcca

SEQ ID NO: 245665 - RNA, 76 nt, Homo sapiens
aaacgaccggcggaaacaaagccaccaggcgcacaccagcggggccgaggcgcggcagacagggacaacggccagc

SEQ ID NO: 245666 - RNA, 41 nt, Homo sapiens
gcgagaccagccgagcaacagcccagcacgaaagggcaaac

SEQ ID NO: 245667 - RNA, 67 nt, Homo sapiens
ccaacggccaaacaaacccgaccccagccacagaccagccggggggcagcagccgccaccaggagcc

SEQ ID NO: 245668 - RNA, 47 nt, Homo sapiens
gggcaccggagccagccccgcagcggggcaccggcacagacagaagc

SEQ ID NO: 245669 - RNA, 81 nt, Homo sapiens
cgagaccgcggccgggaccgagggggcaggcagggcccagcaggacgcggaaacaccccggaggcgacccaccccccagcc

SEQ ID NO: 245670 - RNA, 63 nt, Homo sapiens
gcggccagacagagaagccacacccgggaaacacacccaagcacggcgcggaagcaggaaagg

SEQ ID NO: 245671 - RNA, 71 nt, Homo sapiens
gaccaaaacccagccccagcacggaggagagagacggccgccacagcccagacggcgaaagcgggccaaga

SEQ ID NO: 245672 - RNA, 73 nt, Homo sapiens
cgggcaaaacagagccggaacgaacagccgaaaaacccccccggcaacgccaggaagcgggcaccaacagaca

SEQ ID NO: 245673 - RNA, 76 nt, Homo sapiens
aacccaccgcacagccacagggagcaaggcagcagaaaccgacacggagaacggaagcgggagaccaagacgaaca

SEQ ID NO: 245674 - RNA, 77 nt, Homo sapiens
gaagcggaccccgcaagcaccaccgcggcgggacccgaccagcgcggacagccagccccagccccagccaaaccccc

SEQ ID NO: 245675 - RNA, 76 nt, Homo sapiens
ccgcgcagcacgagcggaccacacccaggaccacagcagaccacagcgcagcaaacggagaggcgccggaagaagc

SEQ ID NO: 245676 - RNA, 86 nt, Homo sapiens
gaagagcaagaggaggacaggagagaagaagaagaaaccggagaaggaacagaccccggaggagccccaggacccaggaagccgac

SEQ ID NO: 245677 - RNA, 79 nt, Homo sapiens
aaaggcagccgcggacgccgcgccagcgacaaacaaccaggggaggcgcggcccgccacgaagaagagcaacggaccac

SEQ ID NO: 245678 - RNA, 84 nt, Homo sapiens
cggggcccggaggagggggcagaggccgacgccagccagagagcgcgggccaaccgagccacaccgcccacaaggagccaccag

SEQ ID NO: 245679 - RNA, 51 nt, Homo sapiens
ggcagggggcaaacaagccgaccggaaaaaggaacggaggaagcccccacg

SEQ ID NO: 245680 - RNA, 75 nt, Homo sapiens
ggcggaggcagaggggaggcgcgaaaggggaaaaaagagccggacgacagagcacggcaagaggagcagcggagc

SEQ ID NO: 245681 - RNA, 63 nt, Homo sapiens
aagagcagccaaaaacaccaagccggccccacagcaaccccacccaggggccagacgggagcc

SEQ ID NO: 245682 - RNA, 80 nt, Homo sapiens
gcaaggaacacagaggaggagcacgaccaggacccggggacccagaaacgccccagagggaaaccgggaaggccgagagg

SEQ ID NO: 245683 - RNA, 76 nt, Homo sapiens
gaaccgaagaacgggggagaggggcagcgcccagccccgggggagccggcggcggagaccggcggggcgaagaaca

SEQ ID NO: 245684 - RNA, 40 nt, Homo sapiens
cacgagcccaggcacaggcacgcagagacggggcgccgca

SEQ ID NO: 245685 - RNA, 91 nt, Homo sapiens
cagaggcgcgcggcgccggccggcggcgcgcggcgcgagccgcagccggcccgccgggaccaaaagccagccccacggaggaacccgggac

SEQ ID NO: 245686 - RNA, 58 nt, Homo sapiens
gcggggggaccggcgggcggcaggccaagagacgaagcccgaacaaccaggcgacagg

SEQ ID NO: 245687 - RNA, 78 nt, Homo sapiens
gggccgagagccgccccgaacgggggcccccccgccggacagggaggccaacagacccaacccagaaggcaccaaacg

SEQ ID NO: 245688 - RNA, 77 nt, Homo sapiens
cagcgcccaccggaccagcggccccgcgcgcgcacggcgcgacggcagaagagagaaagccccaggcgagggggcca

SEQ ID NO: 245689 - RNA, 71 nt, Homo sapiens
ggagcggcgggccgggcaagagaggaaacacccaaggaaccaaagcaggccagcagaaaaccccgcgcaca

SEQ ID NO: 245690 - RNA, 81 nt, Homo sapiens
gccggagccggagaacggccaggcggccccgagcggaacggagaaagcgagggcgaaagggcgggggcgccgaggaagaac

SEQ ID NO: 245691 - RNA, 77 nt, Homo sapiens
gaagagcaggagaaaccccagcgacaaaaagaacgagaaacgcgaaagaaaggaacggggggccacgacgggccaaa

SEQ ID NO: 245692 - RNA, 58 nt, Homo sapiens
gaagccagaagcgcgcacgcggacggaacaggcggaagcgggcccccaggcaccccag

SEQ ID NO: 245693 - RNA, 75 nt, Homo sapiens
aaagacaacccgagcccgaacacccggacaagaaggcgcaaacaggagaggaagaggagaccacggagagaaaag

SEQ ID NO: 245694 - RNA, 80 nt, Homo sapiens
ccaacccgaagccgcgccacgacagcgcagggccgcggccgggggccgaaaagaaggacccaacaccgccccaagcacca

SEQ ID NO: 245695 - RNA, 61 nt, Homo sapiens
gcagcgagcgcggacggagaggaaagcggaggacccgagcagccagcaaagaaccacaggg

SEQ ID NO: 245696 - RNA, 77 nt, Homo sapiens
acccgagaaccagacacagaggaccggacgaccgggcaggagaacaccacaggaaccagggaggagcacaaggaagc

SEQ ID NO: 245697 - RNA, 74 nt, Homo sapiens
ggagaccgggccacaagcaaccccggcaccaccaagcgaagacggcgcgcgaagaaacaagaaccggacccaga

SEQ ID NO: 245698 - RNA, 80 nt, Homo sapiens
ggggcgcgcagcgggaacagaggagaaggcagagcccccccaggcagaagcccgagcgggaaccagcgaagccagggcgc

SEQ ID NO: 245699 - RNA, 63 nt, Homo sapiens
agagagaacgggcaaaacggaaaagacaagagaccggaagacgagaacacacaagaaaaaccc

SEQ ID NO: 245700 - RNA, 51 nt, Homo sapiens
ggggccgcccgacgacgagaacaaggagcggcccagagcaaaacagaggaa

SEQ ID NO: 245701 - RNA, 81 nt, Homo sapiens
gcagaaccagaccgggagcacgcacgccacgaaggagacgcgggcgggaggccacgaccgaggagcgaagcgagaggagaa

SEQ ID NO: 245702 - RNA, 35 nt, Homo sapiens
gccgaggagcacccgaaaaggccagccaaccccag

SEQ ID NO: 245703 - RNA, 72 nt, Homo sapiens
ccagcgcgcgcaacacaagacaagaacccacgcgagcgggaacgaccgagagcaccgagaaacacaggagga

SEQ ID NO: 245704 - RNA, 61 nt, Homo sapiens
gggggagaccaggagagaggacaggagaaaggcagcagcacccaagaacggccgacgcaca

SEQ ID NO: 245705 - RNA, 58 nt, Homo sapiens
gaagaggcccacacccgacgccaagccaggaaaggcaaagggaaaggggcgccccaca

SEQ ID NO: 245706 - RNA, 73 nt, Homo sapiens
gaacacgcggacacgcccggggcgaggcccgcggggccaggagacaacaggcacaaagagagaaggaacaccc

SEQ ID NO: 245707 - RNA, 53 nt, Homo sapiens
agagagggccgagccacacgaaacacagacaaggcgaggccaccaggagcagg

SEQ ID NO: 245708 - RNA, 78 nt, Homo sapiens
ccgggcggagagaaccagcgaggacgagagaccccaacaggcccgaccaacaaagaaacccaacagacggaaaccacc

SEQ ID NO: 245709 - RNA, 77 nt, Homo sapiens
gaaccgcgaaggccccaaccacggggaaacaccaaacccaccccgaggggggacaacagaaagccgggaaggaccag

SEQ ID NO: 245710 - RNA, 83 nt, Homo sapiens
cgaccgccgcgcgggggccaacaagcaggacgcgggcccggagaccagcaccaccccgcgacagcccccaccgcgcccggccc

SEQ ID NO: 245711 - RNA, 85 nt, Homo sapiens
ggcccgcgcgacacgaaggcggaagaaaagagacagaagcaggaccggcccacgccaagaccgcaggaggaaacaagcccacgag

SEQ ID NO: 245712 - RNA, 67 nt, Homo sapiens
gagccacggaagccgacagacaaccagaaaccgagcgagccagcacaggggaagagcggagcaagac

SEQ ID NO: 245713 - RNA, 84 nt, Homo sapiens
acgaacaggacaagagagaggaaacgaggcggagagcagcagggaacaggacagggcagaccgccagcagcacagcaagccaca

SEQ ID NO: 245714 - RNA, 76 nt, Homo sapiens
agaggccggagcgcgccgacccgaggagaaccagcggagaggcaaacgaaaccggcagcagccggaggggaagggg

SEQ ID NO: 245715 - RNA, 60 nt, Homo sapiens
gagaacgccgccgaacgccgcccgcacgccgccggcacagggacccccaaaagacaaggg

SEQ ID NO: 245716 - RNA, 67 nt, Homo sapiens
gcggggggcccaagcaaggccggaagaagagcgcagaggccccaccgaagggaagccgaaggaaaac

SEQ ID NO: 245717 - RNA, 82 nt, Homo sapiens
ccacggagcgggcgacgagcgacccgggagacacgacgggcgaccagacgaggggagacggacgggggagagaggccaaacg

SEQ ID NO: 245718 - RNA, 81 nt, Homo sapiens
cggacaccagaccaacacgggaaaggaaaccaaaccaggaaagaaggacaaggagcgaggagaaagagggacaccagagag

SEQ ID NO: 245719 - RNA, 35 nt, Homo sapiens
agggaaccagcaggagcaaacagaacaaaaacaag

SEQ ID NO: 245720 - RNA, 78 nt, Homo sapiens
gggccgggcaagacggcgaagcgcgcgccgcgcccggaccccaggagcaggccgggcccgccagggcacgcgcccgcc

SEQ ID NO: 245721 - RNA, 80 nt, Homo sapiens
ccaggcgccgagaggaccggggggacagcccgggaccggccgaaaggcgaggaaccggcaaaagcagaccggaaaaccca

SEQ ID NO: 245722 - RNA, 93 nt, Homo sapiens
caggggccaggcgaagcacgagcagaccggcccgaccgcccacagacccaaacaaaggacacggcgcagcaacaaacagcggcgacaaaccga

SEQ ID NO: 245723 - RNA, 70 nt, Homo sapiens
cggaaagcacgcgcacagagagcagaaaagggacggacaaagccaaaaggagagcaaaggagcacccgga

SEQ ID NO: 245724 - RNA, 77 nt, Homo sapiens
aaggaagaaagaggcccgcggccaggaggacccagcagccagcgaagccccaaggaagccgggacgcccacagaccc

SEQ ID NO: 245725 - RNA, 75 nt, Homo sapiens
ccaggagaagggcggccaaggacgggcaaagggggacgggacacggagcaaccagggagcacagaaacggccaaa

SEQ ID NO: 245726 - RNA, 69 nt, Homo sapiens
gcgggacgagcggagagagccaacagaggaggaaccagaggaggggaggaaccaccacagaaagcagga

SEQ ID NO: 245727 - RNA, 87 nt, Homo sapiens
ggacgcggacgcaggggacgaggacgaggagcggaggagccgcgggcggcgcggcccagccgccagggaaccaaggaggggccaaga

SEQ ID NO: 245728 - RNA, 70 nt, Homo sapiens
acacaggacagcagccccccccagacccccaagacggagggaacggaagacaagggcaagagaaacacag

SEQ ID NO: 245729 - RNA, 68 nt, Homo sapiens
ggggcggccgacccacccaggacaggggaagagggcggaggaacagcggggaaaagcgcccaggaagc

SEQ ID NO: 245730 - RNA, 39 nt, Homo sapiens
gccagaggaggacagcacggaggagaggcgcgagaccgc

SEQ ID NO: 245731 - RNA, 80 nt, Homo sapiens
cgggcaggacaaccaggggaccagagaggacggcaccagccaggagaggcggggacggacagccaggaccgcgaggcggg

SEQ ID NO: 245732 - RNA, 77 nt, Homo sapiens
aagccaagccggggggggaaaaggcgccgaggcgggacccaggacagacaaggagggcacggacgagagagcgcggg

SEQ ID NO: 245733 - RNA, 70 nt, Homo sapiens
ccacccagcacaccccgcgaaaggaggaggcacagagaagagagaaggccacgcccgaccccaagcaaca

SEQ ID NO: 245734 - RNA, 58 nt, Homo sapiens
gacaagcccagcgaagcaggccggccggcgccacgggacagcgaggaggccccccgac

SEQ ID NO: 245735 - RNA, 70 nt, Homo sapiens
gaacccccacaaaacagcaccgccggccaggaggagagcgcaccaccaaaaaggcaaacacaccagcccc

SEQ ID NO: 245736 - RNA, 98 nt, Homo sapiens
ggggccgagcaccgcgcggcgcgacggcccaggagcgcgccggcgggagcccaggacagcggggacaggagacacccgggcccccagcgaacccgaaa

SEQ ID NO: 245737 - RNA, 84 nt, Homo sapiens
ccgcagcaggaggacgccaggacgacaaggccaccagaacaagcagaagaaagacaagagcagcagggcgagacagcgaaagca

SEQ ID NO: 245738 - RNA, 76 nt, Homo sapiens
caccgagcaacgagggcagcacgggaagacacacaggacacagagaagggacgaggacggccaaacaagaggcacc

SEQ ID NO: 245739 - RNA, 77 nt, Homo sapiens
ccccagacgaacacggggagccgggacaccacagcaagaggaacgggcacgccagaaaagaccaggagaagcagacg

SEQ ID NO: 245740 - RNA, 80 nt, Homo sapiens
agaaccgcgggacggcgggcagaacaaaacagggacgcgagagcccacgaagagcgacggagcgaacccggacgaagaaa

SEQ ID NO: 245741 - RNA, 76 nt, Homo sapiens
gaacacccacggaagagaacgcccgagccccaacccacgcgccccaagaagggaggcgcaggaagagcgccgcagg

SEQ ID NO: 245742 - RNA, 76 nt, Homo sapiens
ggaagagaccccgaagcgcaaggggccgacgacaccaccagcaaagggaccaccacacgaaaccaaggaaaaaccg

SEQ ID NO: 245743 - RNA, 56 nt, Homo sapiens
cggaggagaagcgcaggagaaagggccaaccagaagacggagcaggcaaaggagaa

SEQ ID NO: 245744 - RNA, 42 nt, Homo sapiens
aacagaggccaaggagcaagggaagcgccaccgaccgacaaa

SEQ ID NO: 245745 - RNA, 73 nt, Homo sapiens
agaagcacgaaagccccacccgccgcagcaagcagagagccaagacaggaaaaccaagcagaaggaggaggca

SEQ ID NO: 245746 - RNA, 82 nt, Homo sapiens
cgaagagcgggcggagcgagaggccaggagaggaggacgcggcggccccggcccagcaacggccacccaaagaacaccacgc

SEQ ID NO: 245747 - RNA, 85 nt, Homo sapiens
ccggaggcgcagggcgacggccccaccccggccacgggacggcggcgcggagaaggcagggcggagaacggaaaagcaccaggaa

SEQ ID NO: 245748 - RNA, 62 nt, Homo sapiens
gagcagaaccaacaccaaaggagagagcccaccgccaagagggagaaaccaaggagccggca

SEQ ID NO: 245749 - RNA, 57 nt, Homo sapiens
gaacggaccaggagccaaaaagcgccgggacagaaacaccacgcaaggggggaagaa

SEQ ID NO: 245750 - RNA, 87 nt, Homo sapiens
acagaaggggaggggagggaaaggcccaggaaaaagggagcagaagggccaacgcccccgcgagccagagaacgaacaggccaagac

SEQ ID NO: 245751 - RNA, 83 nt, Homo sapiens
cggcccccgggagccaccgggggcggaggagggagccagcacaggcccagggccccggccaggcccagccccgcgggagaccc

SEQ ID NO: 245752 - RNA, 74 nt, Homo sapiens
aacgaggcagcagcacgcacgaccaaaagcaggaccaaaagcggcaaaccagccggcgggcgccacaacggacg

SEQ ID NO: 245753 - RNA, 68 nt, Homo sapiens
gaagggagcccaagaggaccaggcagcaccggacccacaccgagaccccaccgccaggaaggaagaag

SEQ ID NO: 245754 - RNA, 39 nt, Homo sapiens
gggagaccggggcgggagaaagggggaccagaggaggag

SEQ ID NO: 245755 - RNA, 77 nt, Homo sapiens
cggccgaacgaggcgagaacgcgcagaccggggagggaaagaaaagcaaccagacgacaagaccacaacgacccaaa

SEQ ID NO: 245756 - RNA, 46 nt, Homo sapiens
gcccccacgggcggcgcagggggagagacccccaacacagcaggcg

SEQ ID NO: 245757 - RNA, 48 nt, Homo sapiens
caaagcacgggggcaacagaggaaaaacgacaggcacccagggcaaca

SEQ ID NO: 245758 - RNA, 60 nt, Homo sapiens
cagaggaccacagaaacccggagaccaacaagccagaggcaccccacagcaacagccccc

SEQ ID NO: 245759 - RNA, 70 nt, Homo sapiens
gccaccacgcaaagagcaaagaaacaggccacagggaaacaaaaagccaacggaaaaagaaacggcagag

SEQ ID NO: 245760 - RNA, 74 nt, Homo sapiens
gcgaagacaagagagccagggccggccggacgcaaacgcccgagccagagaagaaaaaagggagggggcaggaa

SEQ ID NO: 245761 - RNA, 71 nt, Homo sapiens
cgagagcggaccgagagcgcgaaacgcacgagaaggacacccccggaccccacgggcggacgagaggccag

SEQ ID NO: 245762 - RNA, 77 nt, Homo sapiens
agcagccgggggggcggcggcggagacgcgggcccgagcgggccgcgagggccacgaaagagagaacaggggggacc

SEQ ID NO: 245763 - RNA, 77 nt, Homo sapiens
gagccacggcagaaaggaagggcagggaaaaaccccagacacagcacaaccaagggcggaaagaccacagcaagacc

SEQ ID NO: 245764 - RNA, 61 nt, Homo sapiens
caagcagcagaagagccaaggaaaaacagcaagaacccaaaaggaaggggggcagaaagaa

SEQ ID NO: 245765 - RNA, 70 nt, Homo sapiens
cccgacggacagaccaacgggacaagaagaaaccccgaaccaaacagagcccaaggagcggcaaagaaag

SEQ ID NO: 245766 - RNA, 64 nt, Homo sapiens
gagcccagcgagacaccggagggacccggagagcagacccagcgccacacacaaaccacacgcc

SEQ ID NO: 245767 - RNA, 76 nt, Homo sapiens
ccgggcgaggcggagaggcagaacaaaggagaaaagcagagacagaagagcgcgcagggccagccacaaggcaagc

SEQ ID NO: 245768 - RNA, 76 nt, Homo sapiens
gcccccaggaccgagcaggaaccggagcaggacaggaaacggagagagaaaaggagaaggagggagagcgacgaca

SEQ ID NO: 245769 - RNA, 63 nt, Homo sapiens
agacgcaaaggagacccccaggagccaggccgcaagacacagcgacaaccgagcacaaaaaag

SEQ ID NO: 245770 - RNA, 70 nt, Homo sapiens
cccgacagccgaaggagggcaagacagcgagggacgaaggagaccgcgcagcacccgacagcacaaaggc

SEQ ID NO: 245771 - RNA, 76 nt, Homo sapiens
ggacccggccagaggaaagaacccgaggaaaaagaccacacaggcagagaagaaagcgaaacacaagcaccaccac

SEQ ID NO: 245772 - RNA, 84 nt, Homo sapiens
gccgcccggcccgcgcccccgccggccccaaagacgcaaacggcccaccgccccgggggagaggacagcccagagcaagcacac

SEQ ID NO: 245773 - RNA, 89 nt, Homo sapiens
ggcgggggaaagggagacggcgagacgcgcagcgccggcgcccgggagacccaggaggagcccgcagcagggccggaaagagggcgggc

SEQ ID NO: 245774 - RNA, 82 nt, Homo sapiens
ggaccagaaaaccgacaacccccagaaagccaagccgggagaaccagggcacagcgcagcggagcgaggaaagcaggcgggc

SEQ ID NO: 245775 - RNA, 73 nt, Homo sapiens
acaacagacgcccaacgagggcaagaccagagagccgcggggaaaggaggcaggaaaaaacagaacaaggccg

SEQ ID NO: 245776 - RNA, 75 nt, Homo sapiens
gagaggaagacgcgaggaagaaacaccagaaaccacagcaggcaccaccagcaccaccccagagcagccgccgac

SEQ ID NO: 245777 - RNA, 59 nt, Homo sapiens
gggcccgacggaggggaggaagaaagcgaacgcgaaaagaaaagccgagagcagccaga

SEQ ID NO: 245778 - RNA, 80 nt, Homo sapiens
caggagcgggaaaaccgagcgcgggagaaggcgcggggaggcccagcccgccgcagggccaccccgcggcccaccgccgc

SEQ ID NO: 245779 - RNA, 59 nt, Homo sapiens
ccaaaccagggccggaaagcgcaagggcgggcagggacagagcaacacaccaggaagca

SEQ ID NO: 245780 - RNA, 60 nt, Homo sapiens
gcggcgacacccacccggcaccgccgggacccgagagggaagacaaggcccacgggacaa

SEQ ID NO: 245781 - RNA, 78 nt, Homo sapiens
agagaaaaaggaagacgaaaggcaaggccaaaagggggggaccaggcgcagcagcgacagaacaagcggcgccagaaa

SEQ ID NO: 245782 - RNA, 84 nt, Homo sapiens
gccaagggagccgcgcaaaggccccggcaagaagagagaagaagaaggaggccgcggccagaaacccaagaaaaagcgaaggaa

SEQ ID NO: 245783 - RNA, 63 nt, Homo sapiens
gggcacggcgggccggggaaaccaaacgggacaggaacgggccggggccagagggggaaccgg

SEQ ID NO: 245784 - RNA, 40 nt, Homo sapiens
gcccggagagcggcgcgcagacagaagagggacaagccaa

SEQ ID NO: 245785 - RNA, 80 nt, Homo sapiens
aagccaagacccagagagggacccaagggagagagggaacggcgaaagggcagcccggaaggagcaccaccaccggaacg

SEQ ID NO: 245786 - RNA, 68 nt, Homo sapiens
aaagagaagccagaaacggaaacagaacaacgcaaaggaccagagggaaaaggcacccagcggacggg

SEQ ID NO: 245787 - RNA, 81 nt, Homo sapiens
gggccggccggagcgcccagccgcggccccgggagacccggccccaaacgcggccacgcgcgcgcagccagggcgagggca

SEQ ID NO: 245788 - RNA, 67 nt, Homo sapiens
ccggacccaacagaggcaggacagaggaagacaggccccggagcaggacgacacggaaacaccgacc

SEQ ID NO: 245789 - RNA, 75 nt, Homo sapiens
acccagcccagaacccccgcgacacccgaaggacagccagaggaaaaaagcagggggcaaggcacacaaacagca

SEQ ID NO: 245790 - RNA, 75 nt, Homo sapiens
gagcccgagccacgcagcggcggagaaaccaccacaaacacgaggccagcaacgaccaacaagacagacccgccc

SEQ ID NO: 245791 - RNA, 66 nt, Homo sapiens
ggacccaaaaagacggacagcccacgggaacaagaggggacagaaaggagaacaaggagcggccca

SEQ ID NO: 245792 - RNA, 69 nt, Homo sapiens
aagccgacccacaccagccaggccccaaaaggccagcgggaagaagcacagagacaaaaccaaaggagg

SEQ ID NO: 245793 - RNA, 80 nt, Homo sapiens
gaaggcgcaccggaggacgacaggcaaaggccagcacagaggagcccaggaggaggaccccccgaccccagcaagagacg

SEQ ID NO: 245794 - RNA, 74 nt, Homo sapiens
ccgaggagcacgcagagagaagcaaaggcgcgaacgcagcaccagcacccaagagaagcccacaccagcaaggc

SEQ ID NO: 245795 - RNA, 56 nt, Homo sapiens
acaaccgaaaagccacaaagggaaccaggaaaagaccgagccagaggacggagaga

SEQ ID NO: 245796 - RNA, 77 nt, Homo sapiens
agaaccgagcagaaagagggaaaaaacccagggggcaggaagagggaaacagaaaggcaccgaaggacccccagggg

SEQ ID NO: 245797 - RNA, 96 nt, Homo sapiens
aaacaagccgggaaagggacaagaagggcaaagccgaagcaaggaaagcaaaaggcacagagaccacccagacacccaagcagagccggaggcaga

SEQ ID NO: 245798 - RNA, 37 nt, Homo sapiens
gccacccaggcccaagaaggaaacaggaacacgaaag

SEQ ID NO: 245799 - RNA, 65 nt, Homo sapiens
ggcgcccgaaaggggagaagaaagggcccaacagagaacagcgacgcaggacagggacaagcgca

SEQ ID NO: 245800 - RNA, 77 nt, Homo sapiens
ggcggggcggcccaccaacaggaacagggcagacgagcggaggacacccaacccgggaccgaaaagacgcggcccca

SEQ ID NO: 245801 - RNA, 77 nt, Homo sapiens
gcgcggccccagcacaagagccggggaagacagggaagccagacaggaacaagcagaaagcacgaacaacgagaaca

SEQ ID NO: 245802 - RNA, 70 nt, Homo sapiens
ccgagccgcaccaggggagaagaagccaccgcaggacaccgggcagggacagagcagaccgggaccagag

SEQ ID NO: 245803 - RNA, 69 nt, Homo sapiens
cagagcgcgaacggagaaagggagacaagcagaacaagcagaacagacgacaaacggaaggagcaaagg

SEQ ID NO: 245804 - RNA, 62 nt, Homo sapiens
ccccccagcgccacagcaaggacacgaggcaccacccagcacacgcacccagccaaacccag

SEQ ID NO: 245805 - RNA, 81 nt, Homo sapiens
ccgcgcgaaaccaacccagaggggccaaaagcgccaaagcgacaggagcggggccgcagccggccaggggacccgaagggg

SEQ ID NO: 245806 - RNA, 61 nt, Homo sapiens
gggcggagacaggaccgcggcgagcaagacaaggccagacccaccgcgagacgcaacggaa

SEQ ID NO: 245807 - RNA, 57 nt, Homo sapiens
caccaaagcaccaaaggcaccaaaagacccaacagggcgaccagaaacgagacgcac

SEQ ID NO: 245808 - RNA, 77 nt, Homo sapiens
gacacagcccaagccccggggaccggggcagcagaccggaagccacaaagagggcgacaccgcaagccggacggcca

SEQ ID NO: 245809 - RNA, 78 nt, Homo sapiens
acggacaggaaccaagagcacagcaaagaaacaggagccaaagaagaggaaggcccacaaagagccggagcacaacgc

SEQ ID NO: 245810 - RNA, 74 nt, Homo sapiens
cagagggagccggcgcccacagccacggcgccggcaacagaccacccccggaggccaagaccccacaacccgac

SEQ ID NO: 245811 - RNA, 82 nt, Homo sapiens
cgaggagccgcccgcggcccaggagggcgcaggagcgggacgagagcgccggaggccgagcggagggccagccacggagacc

SEQ ID NO: 245812 - RNA, 80 nt, Homo sapiens
acagcaggcggccaggccacgggccccaaggagacgacgcgacacggcaggccaaggagcgcagcacgagaccggccagc

SEQ ID NO: 245813 - RNA, 78 nt, Homo sapiens
gggcggcggagaggaaccggggcacgccccgagccgcccgccgccgagcaccgagcagcgcgggagacggggagcgca

SEQ ID NO: 245814 - RNA, 75 nt, Homo sapiens
caccacaagccccggggacacgcacaggaccggcagcgccaacccaggcaccagccacaggggagaacaaaacgc

SEQ ID NO: 245815 - RNA, 78 nt, Homo sapiens
gccaagagaaaaagaaacgaagagacgaaaggggaccagacccagagacgacaccggaacagacacgaacaaggaaac

SEQ ID NO: 245816 - RNA, 71 nt, Homo sapiens
acccgcgagaaacgccgccaagcccaggacccagacccagacgggaggaaagcccaggaaagagacacgca

SEQ ID NO: 245817 - RNA, 76 nt, Homo sapiens
agagccacgagccgccaaacgaaagcggacagacaccgcgccccgaaaaacgaagagagcagcagcgggggacaag

SEQ ID NO: 245818 - RNA, 54 nt, Homo sapiens
cagaaagccgcgcgagaagaagcaacggaggcaaggaggccacggggccgaaga

SEQ ID NO: 245819 - RNA, 78 nt, Homo sapiens
ccaaacccggagcaaagggaggcccagcgaagagaaagaaaacaagaagcccggaaggccggcacaagagccaggggc

SEQ ID NO: 245820 - RNA, 89 nt, Homo sapiens
ggcgaacaggaggagcggcagggcagaaggccaggcgcggccaggaccaaccaagaagcgaagaaaagagaaagaaacagacaagcgag

SEQ ID NO: 245821 - RNA, 70 nt, Homo sapiens
agccgggagcccccgccacaggggaaagaagcagggagccccagaccggaaagccgcccccgccggaacc

SEQ ID NO: 245822 - RNA, 85 nt, Homo sapiens
agaagaggcagcagcggaaggcagcgggagccgaaaacggaaggcacaccccaacacccgccaccccgaggcaggaacagcaccc

SEQ ID NO: 245823 - RNA, 83 nt, Homo sapiens
gacagggcggcggcgccaggcagggcgcagcacagccccgcggcgcccgagccccaccagcggccccgacacaccaggcagaa

SEQ ID NO: 245824 - RNA, 51 nt, Homo sapiens
gagccagcaggggcagcaagagcggccagggaaggaacagagacagacccg

SEQ ID NO: 245825 - RNA, 79 nt, Homo sapiens
gcaggcaaagccggcgacccgcacagccgcaccccaacccccagcccaaaaaaaggggagacagccaaggcaacgggga

SEQ ID NO: 245826 - RNA, 75 nt, Homo sapiens
gggaaggagacagggaagcaaagcgcaacagaaacagagagagagagagaaggagagaagaggcagaggaggacg

SEQ ID NO: 245827 - RNA, 76 nt, Homo sapiens
ggacaccaccagggagccaggagaggggagaaaacgcaggccacaaagacaggaccaagaggaaaaaacaaccgcc

SEQ ID NO: 245828 - RNA, 80 nt, Homo sapiens
acagccgagcgacgagccgagggaccccgcccgccccaagcagcgggacacaggacccgagccccaaagacagaaaagcc

SEQ ID NO: 245829 - RNA, 79 nt, Homo sapiens
gcgagggcgcccgagagacggcgagggccccggagcgcagcacaccagcgccgcgcggggccagccgcccggcccgggc

SEQ ID NO: 245830 - RNA, 85 nt, Homo sapiens
aacagcggggagggagaccgccgcagcgaaggcaaaccagccagcacgggggcccagccagccagcagcgaggggggacggaggc

SEQ ID NO: 245831 - RNA, 84 nt, Homo sapiens
cggaccacgaggacacccggcccgggagccccacacagggaggcccgcgccaccagacccagcaagaaaacaccccgaggggcc

SEQ ID NO: 245832 - RNA, 76 nt, Homo sapiens
gcgcaaaaacaagacggggcgccccacagaggggcgacgcccgcccgggagaaaggcacccggaagagccaacggg

SEQ ID NO: 245833 - RNA, 54 nt, Homo sapiens
caaaaggccccccgcgcaggcacacagcaaaggggccggaaaccccccggaagg

SEQ ID NO: 245834 - RNA, 77 nt, Homo sapiens
ggaaccgcaagcggccaagcacaaagagcgccccacgagagaacggcacacgcgagcgcgccgcccaagagagagaa

SEQ ID NO: 245835 - RNA, 68 nt, Homo sapiens
aagcagggaaggggagaagccacacaacacacaacaaaacgcacgcaaggcgcaaaagggaagaacag

SEQ ID NO: 245836 - RNA, 66 nt, Homo sapiens
agcccaaggaacacgccaacaaacggcaaaccagccagcacgggggcccagccagccagcagcgag

SEQ ID NO: 245837 - RNA, 83 nt, Homo sapiens
gcaggaaacaggccaaggcccgaacagaaccgcccgggggagggaagcagccaagcgggcagaagaggaagccccagacacga

SEQ ID NO: 245838 - RNA, 73 nt, Homo sapiens
aaaccaaacggaaccagagaagagaaccaaacagcaccccgcacagcagaaaggaccacgaaaaacacacaac

SEQ ID NO: 245839 - RNA, 64 nt, Homo sapiens
gggaccggccgggaagcggccaccgacacgcagcagcggccagagaaaacccaggacaacccga

SEQ ID NO: 245840 - RNA, 72 nt, Homo sapiens
caggaggggagagggcaggaaccaccgcccaaagacagaaacggccagcccccacaagggggccagggaaga

SEQ ID NO: 245841 - RNA, 85 nt, Homo sapiens
gacccagcgccggcccccaggcgaagaagcgcagccgcaccggccaagggacagagcgggagccaccagcgccaaagggaagcca

SEQ ID NO: 245842 - RNA, 61 nt, Homo sapiens
aggggaaggccggaaaggccagagacgcgcacgaaacgacgaagaggcccgaggacagagg

SEQ ID NO: 245843 - RNA, 95 nt, Homo sapiens
cgccgcaaccgcaggaggagaagcgcgcgggcacgccgcggccacgcgccggccccagaccagcgacaaggaaccagcggccaagaggaccaggc

SEQ ID NO: 245844 - RNA, 74 nt, Homo sapiens
gaaacagacggccccgagggggacaagaccccccccagggaagaccaaagcaagggaggagaagccagccccgc

SEQ ID NO: 245845 - RNA, 76 nt, Homo sapiens
aagagggcacccacccacgaagggaggaaaagggcagggacagcgcaggcagcagggaggaacacggccaaccaca

SEQ ID NO: 245846 - RNA, 76 nt, Homo sapiens
cgcggcccacggcacaacccaagaaggaggcgcacaggcagcaggaggagccagagcagggcagaagacaagcaac

SEQ ID NO: 245847 - RNA, 76 nt, Homo sapiens
agcagcagccacgggggcaccccagacggaacacgcgaacacgcaaaaggaagcggcaggcacgggacccaagggg

SEQ ID NO: 245848 - RNA, 83 nt, Homo sapiens
aggagcacgaggacggggagcaagaagggagcagaccccgcccagggaacgccacaccgcccaccaagaagagaggccggccg

SEQ ID NO: 245849 - RNA, 35 nt, Homo sapiens
ggcagcaaacccaggacaagcaaaagagcacacac

SEQ ID NO: 245850 - RNA, 70 nt, Homo sapiens
gcggggaggcaccggaagcgcgggccgggcagcccacagcaaggaaagcaaggggagggaagagcccccc

SEQ ID NO: 245851 - RNA, 70 nt, Homo sapiens
agccagaagaagagccgaaagacgggacgagggaagccgccacagcaccaaggcacggcggaccgagggg

SEQ ID NO: 245852 - RNA, 55 nt, Homo sapiens
acagacagcccaacagcccaagggccggagcgagggagagcaggaacacagagag

SEQ ID NO: 245853 - RNA, 78 nt, Homo sapiens
ccccgggacaggcaaggaaagaaagaagccgcgggaaaggacacgagcggcgggccagagaagcagacgcccagcgaa

SEQ ID NO: 245854 - RNA, 104 nt, Homo sapiens
ccgcgagcacagagcccgccgccgaccgccgcccgccacacccgccgccagcccgagcgggaagaagccgcagcaagccgcagcggcgcgcaccgggcggccca

SEQ ID NO: 245855 - RNA, 33 nt, Homo sapiens
gcagagcacagacaacggcaacacccagcccaa

SEQ ID NO: 245856 - RNA, 67 nt, Homo sapiens
aaagcaacagccaaaaaacagacaggggcagaccaaaaaaacaagaaaaggaagaaagccaaagaca

SEQ ID NO: 245857 - RNA, 74 nt, Homo sapiens
ggaacaggcccggcaaaggaggccgaaaacaaccccgacgagagcgaaggccgacagaggcacaacagagcgag

SEQ ID NO: 245858 - RNA, 74 nt, Homo sapiens
gggacgccagccaaggagcagccccacggcagaaggccaaacgcgaagaagacgcagaaacgaggaagaaggaa

SEQ ID NO: 245859 - RNA, 55 nt, Homo sapiens
ggcccccaacagcgccggagcaaacagcaagagggaaacagaaaaaggacaagga

SEQ ID NO: 245860 - RNA, 81 nt, Homo sapiens
gggccggaaaagccaacgccggcgaaggaacacccacaaaagcagaagcagaaacgcagagcccccgcagcccccaccgcc

SEQ ID NO: 245861 - RNA, 64 nt, Homo sapiens
cccggggcggccgcgagcaaggggagcaaggccgcaagaggacgaaggaccaagacgacaaagc

SEQ ID NO: 245862 - RNA, 74 nt, Homo sapiens
cgcgaggcagggaaagaagacaagaggaaaagggagaaccaacaaagagggcaccacgaaacaaagcaagaaca

SEQ ID NO: 245863 - RNA, 58 nt, Homo sapiens
gaaagcaggggagcacccgcgagggcccaaccccggacgcagcgaaggaagaagaacg

SEQ ID NO: 245864 - RNA, 84 nt, Homo sapiens
gacgcagcaggagaagcggaggaagcgaagggaggaagcacgagagaggagccaaagaaccccggagcgcggcacccaggcgga

SEQ ID NO: 245865 - RNA, 60 nt, Homo sapiens
gaaaacagccgacggggccggaagaccgaagccaggcccacccacagccaaaacacccac

SEQ ID NO: 245866 - RNA, 59 nt, Homo sapiens
aggaaaagggaaagaggaacccaagaaggaggaagcagaggggaaaagcagggaccgcg

SEQ ID NO: 245867 - RNA, 77 nt, Homo sapiens
ggagggaggaaaacaaccgagggcagaggcacaaccggggagcgagaaaaggaaaaaaaagagaaaaagcaacccga

SEQ ID NO: 245868 - RNA, 74 nt, Homo sapiens
ccaccccaccaagaacacccagcaggagcacaaaggaacggaaaccaagccaaagaggcaagaaagcccggaaa

SEQ ID NO: 245869 - RNA, 73 nt, Homo sapiens
acaccgcgggacgacaagaggaccccgcgcaaccggcacaacaggcagagaggagaccacgggagcaccaacc

SEQ ID NO: 245870 - RNA, 58 nt, Homo sapiens
gaggcaccaaacggccgggggcccgagaagcccccagccagcccgagggagaggaggg

SEQ ID NO: 245871 - RNA, 55 nt, Homo sapiens
agccaccaaggagcaggaaaacgcacaaacggcagaacgaagcccccggcaccaa

SEQ ID NO: 245872 - RNA, 52 nt, Homo sapiens
accagaaaccggaagcgaggggaccgggaccgcgccaccccggacgcccgaa

SEQ ID NO: 245873 - RNA, 85 nt, Homo sapiens
ccgggccagcccgcgccacggggcggccaccgggcggcggggagcgggagcgcgcagcagaaagagccgcagacgcacagcaacc

SEQ ID NO: 245874 - RNA, 80 nt, Homo sapiens
gagagagcacgaaggacccagcagggcaccaggaagggaccacagaccagcacgccggcgccacgaaccgagcgacagga

SEQ ID NO: 245875 - RNA, 44 nt, Homo sapiens
gagaggaaaacagccacccggcaccagacccggaggagcagcac

SEQ ID NO: 245876 - RNA, 104 nt, Homo sapiens
gggcccggaggccgagccccggcggcgcccgggcccacgcggaacgacggggcgaggcgggggagcgggaggagccagagcacaccgcaccacggccacaggcg

SEQ ID NO: 245877 - RNA, 76 nt, Homo sapiens
caccccgggccagaccaggccgcccacaccagaagcagagccgcaaagcgacagacacagcaccggccccggcagc

SEQ ID NO: 245878 - RNA, 78 nt, Homo sapiens
agcagagggaagagagagccagagcgggggagacgaggcagcaggcaaaacaggaaaaccgccgccggggccagcaag

SEQ ID NO: 245879 - RNA, 76 nt, Homo sapiens
ggccgcccgggccccagaaaccccccgaagaagaccccccacacggaggcccacgcggaccggcagcgccaccgga

SEQ ID NO: 245880 - RNA, 53 nt, Homo sapiens
aagcagagccggcaccacaggaagccgagcagccgcagaacaagaacggcagg

SEQ ID NO: 245881 - RNA, 80 nt, Homo sapiens
ccgcgcccgggaccgacccccgccgcggccgcgccgagcgacaccagccacaggaacgacgaacagcagacagggcgcca

SEQ ID NO: 245882 - RNA, 56 nt, Homo sapiens
caaagaagcagcaaaccccccaagacaaaggggaccaagaacgcccagcccgcggg

SEQ ID NO: 245883 - RNA, 68 nt, Homo sapiens
gaacgcagagcggagggggaccaccccaggaagaagacaacagggcaggagccgagaagcaccacgca

SEQ ID NO: 245884 - RNA, 40 nt, Homo sapiens
gagaggcaccgaacagagccacagaagcaacacagcacca

SEQ ID NO: 245885 - RNA, 90 nt, Homo sapiens
aggaaaacaggaacagagcgagggaggagagagggagagccaaagaagggaggggggaagacagggcccagcaccacaggacgggccggg

SEQ ID NO: 245886 - RNA, 78 nt, Homo sapiens
agggcggcccgaaagcgccgcggcgcgggcagccgggaggagacaacaacaaggccggaggaggcggaggccagccga

SEQ ID NO: 245887 - RNA, 68 nt, Homo sapiens
aggacaagcagggacgcgaggagaccgacaaaaagggccaagaacagggcacagccaaaagacaacag

SEQ ID NO: 245888 - RNA, 82 nt, Homo sapiens
aaccccccaggagagcagcgacaaacgcgagccgccaagcaacagccacggaagaaagcagggggcccacggggcagggaag

SEQ ID NO: 245889 - RNA, 83 nt, Homo sapiens
gaagaagagagaccgaccccccaagaaaccccgccaggaggccacggacgaggcggggacgggggaggacaggagacaggaag

SEQ ID NO: 245890 - RNA, 63 nt, Homo sapiens
gcaaaccggcaggcgcccggacacagaagaggacaggaacagaaagacaacggacaaggcagg

SEQ ID NO: 245891 - RNA, 68 nt, Homo sapiens
gagacgaaaacaagaagaggaaccgagacgggcgccagggaacagaagcagagacagaagcccaagcc

SEQ ID NO: 245892 - RNA, 79 nt, Homo sapiens
aaagacccagaacagcaacgagaaggggaggccaaagagacacagcccaagcagccaggcaagacaggccaacaccgcc

SEQ ID NO: 245893 - RNA, 67 nt, Homo sapiens
gaagagcaggccagcccggacccggaggcccccagcccagagcccgcccgcgccgaggccgaagcga

SEQ ID NO: 245894 - RNA, 39 nt, Homo sapiens
gagcccaaagaccccggagacaggggaaaccgaaacaac

SEQ ID NO: 245895 - RNA, 55 nt, Homo sapiens
caggaggcgcggacacgcaaaccacacaagcccaacagaaacccagaccaaggac

SEQ ID NO: 245896 - RNA, 57 nt, Homo sapiens
ccggacacacagaaccccgagaggggaaagaggaagagcacagaggaacaccgggcc

SEQ ID NO: 245897 - RNA, 80 nt, Homo sapiens
caaaagcagaaaagggcaacagcaccaccgcccagcaaaaaggggaagcacagacagagacacggaagcaacagaggccc

SEQ ID NO: 245898 - RNA, 74 nt, Homo sapiens
gcagaagaggggcggcaggagacgggcgaacacagggaagaaggacggagccagccgcaggggcgaacgaccag

SEQ ID NO: 245899 - RNA, 79 nt, Homo sapiens
gaagcgagggcgaagcacgacacagaaggggaggggagggaaaggcccaggaaaaagaggcacccccgcccccgagagc

SEQ ID NO: 245900 - RNA, 61 nt, Homo sapiens
cgcgagcggcagcaggacaccccggggcagcagaccgcgcgccagacgccaaggacgccca

SEQ ID NO: 245901 - RNA, 74 nt, Homo sapiens
ccggcagacccggggaccgggaaggacaaggcacgaggcgcggcgaccaccacagcagagcccggcgaaggagg

SEQ ID NO: 245902 - RNA, 75 nt, Homo sapiens
agaccccgggaagaagcgcccacaccgggccaggaccaaccaccgcgcaaagaagccacagccggcagccgacag

SEQ ID NO: 245903 - RNA, 79 nt, Homo sapiens
aagcagcgggggggcaggcgacgaagaacaggaaacaggacagggcagggaagggcaacaaaggggggaaaggaacacg

SEQ ID NO: 245904 - RNA, 71 nt, Homo sapiens
gaaaaaaaaaaccggagaggaagagaagagacgaggggcccacaacaaaccaaggagacaaaacaaaagga

SEQ ID NO: 245905 - RNA, 71 nt, Homo sapiens
ggagaggcgacgccccgaccggaacaggagacccccgcaggggggcccgagccggaaaggccaggcaggaa

SEQ ID NO: 245906 - RNA, 52 nt, Homo sapiens
cacacccaggggcaaaggcgggacgcgggggaaaggcagcacccgagagggc

SEQ ID NO: 245907 - RNA, 77 nt, Homo sapiens
gcagaggcaaggggccaccaggaggccagggggcgccagggacagccggaaacagcgggggggcccaagaccaacac

SEQ ID NO: 245908 - RNA, 61 nt, Homo sapiens
agggagcgcgcgcacccgagcagagcgcagcagcaaacagccagggccggcccgacggcag

SEQ ID NO: 245909 - RNA, 70 nt, Homo sapiens
gaaagacaaccgacaaggacaggacagcaaaagaaagccggaccagcgaggcaacaccccaagccgggaa

SEQ ID NO: 245910 - RNA, 57 nt, Homo sapiens
caagagcccggacaccggaagcgggaaagacaaggccgacgcgcacgaacacggggg

SEQ ID NO: 245911 - RNA, 73 nt, Homo sapiens
aaaccggagcggcaaagacagagaggcggagcagcccccggcccagccccacgacggcaggcgcacggaacag

SEQ ID NO: 245912 - RNA, 70 nt, Homo sapiens
gcgccggccgagaaggcagaggcgagccaggaccccaggagcgggccagcccgcccccaggagggcagca

SEQ ID NO: 245913 - RNA, 39 nt, Homo sapiens
ccaggaagggacccgagcacggagacgagcacaacacac

SEQ ID NO: 245914 - RNA, 75 nt, Homo sapiens
ggcaaccggagccccccaggagggccgcgggggacccgagggggacccagcgcccgggcgcccaccgaacgacca

SEQ ID NO: 245915 - RNA, 74 nt, Homo sapiens
agccaggccaggagagcccgccccccaaagcgaagccaaagcgaaggcaaaggccaagaaggcagggaaagggc

SEQ ID NO: 245916 - RNA, 67 nt, Homo sapiens
gggggcgggacaaccagccccgagacacggacgcagaccgcgaccgcacaagcagccgccagcggaa

SEQ ID NO: 245917 - RNA, 78 nt, Homo sapiens
caccgaccagcacaaccgccacgcgggcaccaccacccgagacccaaccgagacaaccgcgggagaccgaaggaccac

SEQ ID NO: 245918 - RNA, 75 nt, Homo sapiens
caggcaagagaaccgcaagggcaccaccccgagagaggacgaagaacaagaagaccccggcgggccgggcccccg

SEQ ID NO: 245919 - RNA, 80 nt, Homo sapiens
gggaaacaaaaccacacagcacgggaccggaaaaggacgcgcgagaagcccggcggggggagcgcccgcggggaacaaag

SEQ ID NO: 245920 - RNA, 78 nt, Homo sapiens
cggaagacccaaaacgaaagaagggagaggcggggagcagcgccgggagaaggaccacgcaggggccgggagaggaag

SEQ ID NO: 245921 - RNA, 83 nt, Homo sapiens
ccgaagcaggccgaagacgggacagggacaggcggccgacaggaagggaaacaaggcagcagccccgccccaggagaaccgca

SEQ ID NO: 245922 - RNA, 66 nt, Homo sapiens
ggacggccccaggagaagagccagagcgggaggacgacgagagagccaccaaacccacggcaccgg

SEQ ID NO: 245923 - RNA, 75 nt, Homo sapiens
aggagaggcgccgaccgaccggggccagcggggaggcgaagacgagacagaaaaacaacagacgaggaagaagca

SEQ ID NO: 245924 - RNA, 75 nt, Homo sapiens
acgaaaaggaggagaaaacccacaagcaacaggcaggagaacgaagagaaaggacacccacccagaaccaggcaa

SEQ ID NO: 245925 - RNA, 77 nt, Homo sapiens
cccgcagcgcagcgaggaagaaccgccggggacgaaacaaaaagaccggaagcgagaccgccccaagggcccggcag

SEQ ID NO: 245926 - RNA, 87 nt, Homo sapiens
aggaagaagcgcgagacccacgaggcgcggcccggaggcccagaaacgggccgcgccaccaaggccccggccaggacagccgggcag

SEQ ID NO: 245927 - RNA, 71 nt, Homo sapiens
ggaaacccaccaacagcagggaccagaagacacggaacggacagggcaccacccgcaacgggagagaaacc

SEQ ID NO: 245928 - RNA, 33 nt, Homo sapiens
cgcgggccgccggccacagcaagcacagcacac

SEQ ID NO: 245929 - RNA, 54 nt, Homo sapiens
gaggccggaaccgcccagccccgcgaaccaaaacgccacggaggaggcaagcaa

SEQ ID NO: 245930 - RNA, 72 nt, Homo sapiens
gggggagaccggaagagccagcgccaaggcggaaaagcccaagaaacaaacagacccagagagggaccaggg

SEQ ID NO: 245931 - RNA, 61 nt, Homo sapiens
gcgggacccgaggcgagccaagcaggcccacgaccagaacgaccggaccacaggacacaag

SEQ ID NO: 245932 - RNA, 55 nt, Homo sapiens
acagaaaacgcaaggagaaacccaagagcagcggcagccccagggaacccgagaa

SEQ ID NO: 245933 - RNA, 69 nt, Homo sapiens
acgcaacagccccagacacggcgaccggccaccgaaccgagcgaagaccagacgccggaccacggacca

SEQ ID NO: 245934 - RNA, 72 nt, Homo sapiens
agacccgggggagacgccgccaaggaccagcgccaggaaacagagaccccaagagacaaccccacacggcaa

SEQ ID NO: 245935 - RNA, 70 nt, Homo sapiens
ggggcgccagggaagcgggaggcaggcagccagggacaagagaaaaaaagggcgggcgaacaaaaagagc

SEQ ID NO: 245936 - RNA, 79 nt, Homo sapiens
gcacacacgcaaggccgggaaacaaagggaggaacggagccccgccagacgccccaaacaaacacaccgccggccagga

SEQ ID NO: 245937 - RNA, 76 nt, Homo sapiens
cgcccggcccgagcgcaccggagggacggcacagggaggccagccggagaagcgagcagcgccaacgaaagaaggc

SEQ ID NO: 245938 - RNA, 70 nt, Homo sapiens
aggcaggcaaaaacaggagaccgcggccgaccagagaacagggacggcacgacaggaaaacacaagaaaa

SEQ ID NO: 245939 - RNA, 68 nt, Homo sapiens
gccgggccgaaccggaagggcaagacaacgaagagaggaaagaagcggaaaggagggagcacacaaca

SEQ ID NO: 245940 - RNA, 112 nt, Homo sapiens
caagaagggaaggcacgaaaagcacggagaggcaccgcgggcaacaggcccacaggacagaggggccagggaagcaccgaagagagacaaagcggcgaaaaccgggacaacg

SEQ ID NO: 245941 - RNA, 51 nt, Homo sapiens
ccggcccacagcacccggccccgcggggcgccagggcaagaaggccacaac

SEQ ID NO: 245942 - RNA, 79 nt, Homo sapiens
cggcagcggccgcacaccaagggcgcccccccggaacggcaccacaagaggcagcagcgaccagaaaagcaccaacaag

SEQ ID NO: 245943 - RNA, 62 nt, Homo sapiens
ggcccagaggccggcggcagcagcccagagcgcaaagagacgccaaggaggcccgaacggcg

SEQ ID NO: 245944 - RNA, 42 nt, Homo sapiens
cgcccacccccaccgcagaagcgggacgacccgggacagccc

SEQ ID NO: 245945 - RNA, 84 nt, Homo sapiens
ggagcccgagacgagggccacaggggaaaaaagaccacgaggagcagggcagagccaggccccggggccccagcggcaccagcg

SEQ ID NO: 245946 - RNA, 84 nt, Homo sapiens
agccgaagccggagcgcgcggccgggagcacgggcgccggcaagacaagaggcagccagcggacgggcgaccccgcacacacac

SEQ ID NO: 245947 - RNA, 71 nt, Homo sapiens
aggaccgccgggcaagacccaagggcggagaacggaaaagcaccaggaagcagagaggaccgcagaaggga

SEQ ID NO: 245948 - RNA, 74 nt, Homo sapiens
gggaggaagagggggacgccccggcaacccaggggcggccacgaccaccaggcgccaggaaaagaaccgcccag

SEQ ID NO: 245949 - RNA, 75 nt, Homo sapiens
gacaaacagaagaaaagcgagaaccagcagcagcaccaaaaccccagacaggagagacaacggaggcaagaaaga

SEQ ID NO: 245950 - RNA, 76 nt, Homo sapiens
ggagcacaacgcccgaagagagcacagggagagcgagggagcaggacggaagaggggcagccccgggaaaacagcc

SEQ ID NO: 245951 - RNA, 60 nt, Homo sapiens
gaaaacggacaaaaccccaccaccggcagcaccgaacaaccgggcacccacccgcgagac

SEQ ID NO: 245952 - RNA, 70 nt, Homo sapiens
aaagagaaggcaacaaggcacacaagcggggaggaccccagaccacggaacccaaccgaagaagaacaga

SEQ ID NO: 245953 - RNA, 75 nt, Homo sapiens
aacaggaccacaggcccggaaaagggaaggccagacacagccagaaggacccaaacccaggaaggaaacagcccc

SEQ ID NO: 245954 - RNA, 73 nt, Homo sapiens
cagcggacaacagaaaggaaggcaacggaggccaggaagaaaagacgaaacagaggaagagccagacaaggaa

SEQ ID NO: 245955 - RNA, 79 nt, Homo sapiens
ggagaccagaagagaaccggccaaaacagaagaggcaaagcccagccacagcagcagcccagcagcaaacaaccaaaga

SEQ ID NO: 245956 - RNA, 82 nt, Homo sapiens
aacagaacagcagaaccccccagccaaaaacgccgaaacggaaagcccaagaggagacgacgggcggaagaacgggaagagg

SEQ ID NO: 245957 - RNA, 74 nt, Homo sapiens
ggaccaaacagcaagggaagccagagacccgagagaacagcaaacaccggagggcgagaccgacagagacgggc

SEQ ID NO: 245958 - RNA, 35 nt, Homo sapiens
ccaggcagagcaaagggaggcccccccccacaagg

SEQ ID NO: 245959 - RNA, 61 nt, Homo sapiens
gaaaaagagcccggaaagaagagacagagaggggagaacccccagcgaaccggccaggcag

SEQ ID NO: 245960 - RNA, 83 nt, Homo sapiens
agaaaacgaagaggagaagacaccaaaaagcaaacggaccagaccgaccaccaaaagccccgggaccaaggacacgcagaccc

SEQ ID NO: 245961 - RNA, 85 nt, Homo sapiens
gccgagaagcccggacgggcgagcagcaccacccagcccggggccgcgacgcagaagaggagccccgccgaggcagagggccggc

SEQ ID NO: 245962 - RNA, 73 nt, Homo sapiens
aaaacgggaacggccagaccacggaccaaagcagaaccacaaaagcggcgagcagaagaagcagcggggaaaa

SEQ ID NO: 245963 - RNA, 78 nt, Homo sapiens
cacccagcaggggacaccagaagcacgaagaccaggacacaaccggaaccgcagggaggcagcacggcaggagacgag

SEQ ID NO: 245964 - RNA, 75 nt, Homo sapiens
aaccggccagggacaacccagaacaagccccccaacgggggccagcagccaaacaacagcagcagcccaggccac

SEQ ID NO: 245965 - RNA, 81 nt, Homo sapiens
caggagaccggaggccaacggcagaagccaccacaaaagcgaaagggcacaccacagacccacagaaaaggagaaaaacag

SEQ ID NO: 245966 - RNA, 57 nt, Homo sapiens
aaaagagcaccagacaagaacgcaaccccacaagcaggacagccggacacacaagaa

SEQ ID NO: 245967 - RNA, 83 nt, Homo sapiens
cagcagcacgcaaacaacacagaggacacagaaggcagggcggggggggagagcgcagcccacgcggaaggaccagcacagcc

SEQ ID NO: 245968 - RNA, 70 nt, Homo sapiens
ggcacccggcagcccagggccacagccaacccaacagacagcaaggacaaccaagcaccacccaagccac

SEQ ID NO: 245969 - RNA, 71 nt, Homo sapiens
aagcgcaagacaggagcggaggcaaccagaaacaagagacagccaagaagaaacagccacgacgcggagcg

SEQ ID NO: 245970 - RNA, 87 nt, Homo sapiens
gaccgccaggccaccaccggccgcccagccaggacgcgcccggagaaggccggacaaagggaacagcgaagccaacagccaaaagag

SEQ ID NO: 245971 - RNA, 97 nt, Homo sapiens
caaccgaccggccaacgacgccccaaggcgccaaggaggggacccccaggaccccgccccccgaggcgcagcccgaacccagcagccacacgccaac

SEQ ID NO: 245972 - RNA, 71 nt, Homo sapiens
aaaacaccaggcaaggacgacgacccgaccacggcggaaacggaggagagaggacaggcaaagaaaaaaag

SEQ ID NO: 245973 - RNA, 72 nt, Homo sapiens
cccagcaagccagcgccggacccaggggggggagagggacgcccaccacgggaagaggacccaagaagacca

SEQ ID NO: 245974 - RNA, 69 nt, Homo sapiens
agccaggggaagggaagagagcagcaagacgggagcaggccagcacacacgcaaacagcagaaaaccaa

SEQ ID NO: 245975 - RNA, 75 nt, Homo sapiens
cccgggccaccgccccagcgccaccaaagaccgcgacgccagcggggacgacgagcccacggcacaacggaccga

SEQ ID NO: 245976 - RNA, 54 nt, Homo sapiens
agcaccggagggagaagacagagccaccacgggcgcccgacccgcaccaacgga

SEQ ID NO: 245977 - RNA, 79 nt, Homo sapiens
cgggacggacgggaggggcgccgcggcggcgggcgcccccagccacaagcgagcagaaaggaacaggaaaaggaccaaa

SEQ ID NO: 245978 - RNA, 63 nt, Homo sapiens
cgggaaggaccaaggaggagcacagaggccagaagcaagccaggaaaggagcagcagaacgaa

SEQ ID NO: 245979 - RNA, 84 nt, Homo sapiens
aggaagcccccaagcgggcagccggcccccagccccgaacacggcagcaaggacacggaaggggggccccagcccggccgaacg

SEQ ID NO: 245980 - RNA, 65 nt, Homo sapiens
aaaacagacccaagcaacccgcggggacagggaaaaagcagagaccaacagaccagcaacaggcc

SEQ ID NO: 245981 - RNA, 60 nt, Homo sapiens
ccccgcgcgacgacccgccgccgccgggcggagcacgggagggcagaaaagacagaagca

SEQ ID NO: 245982 - RNA, 75 nt, Homo sapiens
gaaacgaggcccccgccgggccgggacccccccccgagggaggggggggaccccagggcgaaagaccagacgcaa

SEQ ID NO: 245983 - RNA, 73 nt, Homo sapiens
cagagacagaagagcaaaaggaaccgaggaaaaccacgagaggacacaaaccaccgagcccccggaagcacag

SEQ ID NO: 245984 - RNA, 73 nt, Homo sapiens
acacgagccaagaaaaggacgaacgcagacacccgagcgacacaggaagaacaagaaggagaaccacccagcg

SEQ ID NO: 245985 - RNA, 72 nt, Homo sapiens
gaaaccaacaggcgaccccaacagcccccaaaacacaagaggacggagaagcgacgaaagaagccgggacaa

SEQ ID NO: 245986 - RNA, 78 nt, Homo sapiens
ggggagagagcggagccgaaaccaagccggacccgaagaccaggagcagggccgccccgaggagagcgacgcccgggc

SEQ ID NO: 245987 - RNA, 70 nt, Homo sapiens
ccacccgcacgcccaaggcacgaacgagcgaccgccccaggccccccaccaggcgcccaccccaccaacc

SEQ ID NO: 245988 - RNA, 66 nt, Homo sapiens
acaagaagaaacaagcacccgccgggccgaaccggaagggcaaggacacggggggcacacaaccca

SEQ ID NO: 245989 - RNA, 75 nt, Homo sapiens
ggaagacaacgcagacgccagcaccaagcccaaagcgggccagacacgaagaggccggcgaaggaagaaggacca

SEQ ID NO: 245990 - RNA, 73 nt, Homo sapiens
ccacaggggaagaaccacaggcggggagccaggaacgggggacaaggagaggcacacacacagaaccacaccc

SEQ ID NO: 245991 - RNA, 58 nt, Homo sapiens
acccaacaggcagccccagaacaccaaagagccggcaaaggcaaccagcagcaaccag

SEQ ID NO: 245992 - RNA, 75 nt, Homo sapiens
cacgcaggaccacaaaacggaaggcgagcagacccggacggagaaggagccgcaggccaggacgccacccgacac

SEQ ID NO: 245993 - RNA, 76 nt, Homo sapiens
agccggacgaggcgcgcggagagggcgcggccagggcaacagcaggcgggacacggggcgacccacccaaaagccc

SEQ ID NO: 245994 - RNA, 73 nt, Homo sapiens
ggcagcccggccgacaaccacggagccaaaaaccgaacacccggaaggggacaagggacggcgaacagacccc

SEQ ID NO: 245995 - RNA, 75 nt, Homo sapiens
cggaagacccggacccaccacaccgagcacaggcccccggagggaggggagagcccgaccagagaaaaggcggaa

SEQ ID NO: 245996 - RNA, 78 nt, Homo sapiens
cgggaccgggaccgcgcggacccggccgggagaagcagcagcgcaaggaccaaaggcagaagccccaaccccaccaga

SEQ ID NO: 245997 - RNA, 75 nt, Homo sapiens
caaggggccaccaggaggccagggggcgccaggcaagcaccgacgaagcagaggagacaagaggcaaaggcggcg

SEQ ID NO: 245998 - RNA, 37 nt, Homo sapiens
ggaaacccaaacccgcccaaagccgagaacccagcac

SEQ ID NO: 245999 - RNA, 55 nt, Homo sapiens
ccaggcgaaccggccacgcacccccgaagccggaaggagggccccggagcagcca

SEQ ID NO: 246000 - RNA, 80 nt, Homo sapiens
gcgcggagagacccagaagccgagacgggcccccaccccacaggaggaagccgaagaagaacagaagcgaaacagagcaa

SEQ ID NO: 246001 - RNA, 55 nt, Homo sapiens
agccccaacggcaagcaacgcggccaggagaaaggaaagaaaccaagagagacaa

SEQ ID NO: 246002 - RNA, 84 nt, Homo sapiens
gcggggagcacgcagcgacgaagccgggacaggacaaccggcccccaggcggcaagaggacacccgcccgggagccaggccgca

SEQ ID NO: 246003 - RNA, 78 nt, Homo sapiens
caaagcgaaggcacccgaaagcccaaggcagaaggaaagggacagaggggcgcggcagcgggaaacgaaaagaacgaa

SEQ ID NO: 246004 - RNA, 86 nt, Homo sapiens
gaacgcagccggagcacccccggccagcggccggccaaggacgcgaggcagcaaaaccccagaagaggcgaaccgcaggaaaccag

SEQ ID NO: 246005 - RNA, 82 nt, Homo sapiens
ccaggccagcccaggcggagaggaggaggggaaacccaggagaggcggcacacccgggaggaagaaccccagcacaagaaga

SEQ ID NO: 246006 - RNA, 57 nt, Homo sapiens
aagcgcagaaagcaggcgaacccgcggcgcaaaacggacggggaaggaagccacacc

SEQ ID NO: 246007 - RNA, 77 nt, Homo sapiens
aggcaagaagcagaaagagacgccaggcgagcggaggaggaccaagcgccagaacgaccaacgaccacaacgacggg

SEQ ID NO: 246008 - RNA, 74 nt, Homo sapiens
gaagaccccgccagaggcccccccaggcaggaaagggagagaggagaaccaggcagcccgggccagccgcggag

SEQ ID NO: 246009 - RNA, 76 nt, Homo sapiens
aaaagcaacaaagagggccggcagaggccgcccagacagagcacagggagcgggagagccggacgcgaaccagcca

SEQ ID NO: 246010 - RNA, 57 nt, Homo sapiens
gcccccccggggcaacccagacggcaacaaaggcgagaggcacgggaacacaccgcc

SEQ ID NO: 246011 - RNA, 103 nt, Homo sapiens
aaccacagcgagaaaggcccccacacccggaacgacaccaggaacccaagcccggagcgagagcgagagaagggaccagccagaagaaacaaccgacaacccc

SEQ ID NO: 246012 - RNA, 80 nt, Homo sapiens
gagagcggcggggcaggggcaaagaggaggacgaagaaaagcagagcaagggaacccaggaaacgcaaagcacgaaggaa

SEQ ID NO: 246013 - RNA, 75 nt, Homo sapiens
ggaggaggcagaagcgcgcgagcccgggagagcaaggacccagggagagaggaacccaacaagaagaaaaccagc

SEQ ID NO: 246014 - RNA, 64 nt, Homo sapiens
ccccccaaaaaaagcagcccggagccagccagggcacgaaccagagcaaaagaaaaggccaaaa

SEQ ID NO: 246015 - RNA, 88 nt, Homo sapiens
aacagcccccgaaaacgcacggagcgggcccgggccagaggcagaaaacggacggaagaaaaggcggccgggggacagccaaagagac

SEQ ID NO: 246016 - RNA, 55 nt, Homo sapiens
ccgggggcccagcccgggcggcgcggccaggcccaagcagccccaagggggagca

SEQ ID NO: 246017 - RNA, 75 nt, Homo sapiens
gccagcgccccaggccaagagggacccacccggcggaaggggcaggaccagcgcccggcaggcgccacgcgccgc

SEQ ID NO: 246018 - RNA, 86 nt, Homo sapiens
agcgcgaaggggaggaagaaaagccagcgaaacagaaccgcagagggaaagaggaaagggaaccgggcccaccaggaccaccacca

SEQ ID NO: 246019 - RNA, 114 nt, Homo sapiens
ggcggacaacgagaaacggacaaccaacggccaagaacaagaacaaaggccgcgacggagggggaagaagagcgcaccgaaggcacaagggaaaccagaacaaaaggccagagc

SEQ ID NO: 246020 - RNA, 77 nt, Homo sapiens
cgggcccagggcaggccggccaggcaggcacgagaaggggaggagccgccagggaaagacaacccgggcaaggagag

SEQ ID NO: 246021 - RNA, 78 nt, Homo sapiens
aagcggagcccaaggaccaagggaccagagccccgggacacaggacggaaggccacacaaaagaacacgaaagacacc

SEQ ID NO: 246022 - RNA, 76 nt, Homo sapiens
gcagggcggcacgaacggccagcagcggaagccgcagaaggaccggccagaagcaagccggagaacagaaagacaa

SEQ ID NO: 246023 - RNA, 86 nt, Homo sapiens
gacaggcaggaaaagacaggccagaagcggacccagaagaggggagcagcaaggaggaagacagccggggccggaggggagccgaa

SEQ ID NO: 246024 - RNA, 80 nt, Homo sapiens
caacagacacgccaccccaaggagcacgcagggcgagggaacagagagaaacccggcaagaaagcgaacaagaggcgcca

SEQ ID NO: 246025 - RNA, 105 nt, Homo sapiens
agaagacagggagcgagagcggagaagcgggaggagaccacccaaacgcggcacgggagaaagccaacaggcagaccagagacagcgccacgcacccggggagca

SEQ ID NO: 246026 - RNA, 75 nt, Homo sapiens
ggagcacgcacccacgaggccaaacggaacaaaaccgaaccaacaccacacaaacccgacgccaccacgggaagg

SEQ ID NO: 246027 - RNA, 59 nt, Homo sapiens
cccggcgccccaccccaggcggcagccagaacggggcaacaggacacgccggcccaggg

SEQ ID NO: 246028 - RNA, 71 nt, Homo sapiens
caagcaggaaaagaaacccacgcgcaaaagggcgacccaccaacaggcaacccagacaaagaagagcagcc

SEQ ID NO: 246029 - RNA, 73 nt, Homo sapiens
cgaggaggagccccacccgcgcagacagccgacccggacggccccagacccgcgaccccccccccgcgagccc

SEQ ID NO: 246030 - RNA, 75 nt, Homo sapiens
cagaaccaagcggagagagcagcccggcagacgcagaaccaagcgcagccgggagaggacgacaaaaggaacagc

SEQ ID NO: 246031 - RNA, 77 nt, Homo sapiens
ggacgccggcggcagagagagcaccaacggggaaaaagaaaagggcgaagacccgaagcagcgcaggaacagaagag

SEQ ID NO: 246032 - RNA, 39 nt, Homo sapiens
ccgaggcgagacggaaagagcccacgcaggagacgggag

SEQ ID NO: 246033 - RNA, 63 nt, Homo sapiens
cacggcacgcagcgcgcccgccagggcccagaggagagaaaagagggagggaaggaaaagggc

SEQ ID NO: 246034 - RNA, 76 nt, Homo sapiens
aggagccggagcagaagcaaagaggggcgaggcgaaaagggaccaaacaaaaagcgacggccaaccacggacccca

SEQ ID NO: 246035 - RNA, 53 nt, Homo sapiens
agccagacgcagagacaaaacaagcccccaggaaccacggcggaaacagggag

SEQ ID NO: 246036 - RNA, 77 nt, Homo sapiens
cgggggcacagagaggcggaccggaagcgagcaggagcagagcggaagacccaccagaaagagcaaacaacaggaaa

SEQ ID NO: 246037 - RNA, 54 nt, Homo sapiens
gccgcgacaaaagggacaaggagaaaagaaagccagaaggaaggaagcaacgaa

SEQ ID NO: 246038 - RNA, 68 nt, Homo sapiens
agaagccagagcgaggacgccggcaggcagagcaaggcgcagccgggaacaacgcaccgagacccgca

SEQ ID NO: 246039 - RNA, 83 nt, Homo sapiens
cagcaggcagaagaccccaaggaagggagaaagaggcgaaaaggagcaagcaaaacacaacaacccccaggccggcgagacgg

SEQ ID NO: 246040 - RNA, 59 nt, Homo sapiens
gccaacaagaccaagcccgcggacgccaggggccagacccacgaaggagagaaaaggcg

SEQ ID NO: 246041 - RNA, 70 nt, Homo sapiens
accgggaacccagggcggaacaaaaagaggaccaagccaaagaacaaaccagcagcaaccacaacggggc

SEQ ID NO: 246042 - RNA, 62 nt, Homo sapiens
agcaagagcccggacaccggaagcgggaaagggccggagcgagggagagcaggaacacagag

SEQ ID NO: 246043 - RNA, 61 nt, Homo sapiens
caggagcacccggcgcccagacaaacccgaccgcagcgcaggacccgccaaacgcccagcc

SEQ ID NO: 246044 - RNA, 80 nt, Homo sapiens
accacagacccagccagccaccagccggagcaagagcccgcggccccaaaaagcggcgcaagacggagggcgggagaagg

SEQ ID NO: 246045 - RNA, 75 nt, Homo sapiens
gagacggcaaggaggagccagaggcaacaaggcggacaagagaagccgccaggaccaggccggaagacacccccg

SEQ ID NO: 246046 - RNA, 79 nt, Homo sapiens
cccggccggacccgcagcaggcacaaggccgaccgccgcgccacagagcacaccaaccccgggcaccccgaaggagggc

SEQ ID NO: 246047 - RNA, 76 nt, Homo sapiens
agcgccgagcggagggggcgaagagacgccagaagaacgaggaggagaaggacaacggcaagcggagaagagcaag

SEQ ID NO: 246048 - RNA, 75 nt, Homo sapiens
ccacccaccggcccacccacaagcgcacaggaccggagagccacaggccgcacaccccagagcccgaagggggcc

SEQ ID NO: 246049 - RNA, 82 nt, Homo sapiens
ccggcgccgccaggccgacgaaaagcccaagggaagaaaacgccagagaagcagagcagcccggagcgaggggagaccgggg

SEQ ID NO: 246050 - RNA, 38 nt, Homo sapiens
gagaacaaagagggaaggagaacggagccgccgcgccc

SEQ ID NO: 246051 - RNA, 71 nt, Homo sapiens
ccaaaagagccagacaacaggcgccaaaaaggagcaagaggcaggggccaagaaaaccagaggacaccacc

SEQ ID NO: 246052 - RNA, 73 nt, Homo sapiens
cgcagacaccacccaaaggacccagagagggaccagggccaaagaagagccggggggcaggcggacagcaagc

SEQ ID NO: 246053 - RNA, 79 nt, Homo sapiens
gaccaccaaagcaaaacaccgccaccgggcagaaaaagaccagggcagacgacgacacgcgacaaccagcagggccacc

SEQ ID NO: 246054 - RNA, 80 nt, Homo sapiens
cggcagccacccaccgccgccgcccccaggcacccaaaagagaaaccacgagccccgaggccgagccccggcggaggcac

SEQ ID NO: 246055 - RNA, 54 nt, Homo sapiens
aaacgggcgaagcgacgagccgcgaggagggggagaggcaccagcaacagacca

SEQ ID NO: 246056 - RNA, 60 nt, Homo sapiens
cagagccagcgcaggggaagccgcaaggaccaacggaacaccccaacggacccaggcaaa

SEQ ID NO: 246057 - RNA, 66 nt, Homo sapiens
acgaggcggacgacgaccggccaacaagagacaggggccaggccaggggcaggggaagcacccaac

SEQ ID NO: 246058 - RNA, 63 nt, Homo sapiens
cccggaacgagaagccaacagagcgcccgcaccccagccaagccagaggagaacaaaaacggg

SEQ ID NO: 246059 - RNA, 79 nt, Homo sapiens
cggcggagacgccggcgcccccccccccgccgggaccccgaaaaagaccaggaagggaaaacccagagaaacggagaaa

SEQ ID NO: 246060 - RNA, 72 nt, Homo sapiens
aaaaacaagacgcagcacaagcaccgaacaggagcacaaaggaacggaaaccaagccaaagaggcaagaaag

SEQ ID NO: 246061 - RNA, 80 nt, Homo sapiens
cccacagagcacaggggcccaggccaggcgcaacaggcccaggggagagaccccagaggaacccagccggggcagggagc

SEQ ID NO: 246062 - RNA, 78 nt, Homo sapiens
ccaggggcacggccagacacgcacaaaagaagaaccgaggaccaagaccggaagggaaagcccagcagcccagaggga

SEQ ID NO: 246063 - RNA, 81 nt, Homo sapiens
gagcgaagaggaaaacagcacaaggccaacacgaggggcgggcacaagggaagacagcgcccgggacccaacggaagaggc

SEQ ID NO: 246064 - RNA, 70 nt, Homo sapiens
aggccaagaggcggcgggagaccccaaccgcagagcgcccggcaagaacggaagcacgggcggaggaaag

SEQ ID NO: 246065 - RNA, 50 nt, Homo sapiens
gggagaagcacgcaacgagggagacagacaggaagggaaggggcggagac

SEQ ID NO: 246066 - RNA, 76 nt, Homo sapiens
ggacgggacgccaagagacagagaaggacaacaccaggagacaaagccacaaaaacaccagaaaaaccaagcagaa

SEQ ID NO: 246067 - RNA, 53 nt, Homo sapiens
agaaacggaacaccaagacgagaagaggcgaacggaagcaacacccgggaaaa

SEQ ID NO: 246068 - RNA, 65 nt, Homo sapiens
gaccagggcaacaccaaaaacaaaacgaaccaggacggcaaaggcagcagcagagcgaacaggac

SEQ ID NO: 246069 - RNA, 102 nt, Homo sapiens
gcgaaagccagccagcccacacgcacacgagccagagaagaggaaaggagggccgcccccagggaacaaacccccagccggcccgcgggaccaggccagggg

SEQ ID NO: 246070 - RNA, 83 nt, Homo sapiens
gcaaagaaccaggggagagagcaaggccgcgacggaacccaaagccccggccaacgcagagagccaacagcagagagaacaac

SEQ ID NO: 246071 - RNA, 82 nt, Homo sapiens
ggggacagagacccaccccgccggcccagccgcgccccgccagggccggaggacgggcaaaacggaagaaaagcccacccac

SEQ ID NO: 246072 - RNA, 76 nt, Homo sapiens
cagccagaagccaggagcccggacagcgggaaaagcgcagacccagcaccgggccagagcaagcaccagaagagcg

SEQ ID NO: 246073 - RNA, 77 nt, Homo sapiens
gcccccaaagagagaaccggagagcacccaacagcacgagacagcggaaagaagaaaaacaacagcagaacaacgga

SEQ ID NO: 246074 - RNA, 72 nt, Homo sapiens
gccgccgccgccgccgccggccccgccacaggggacgaagggaacccgccgggcggcccggcacccagcccc

SEQ ID NO: 246075 - RNA, 76 nt, Homo sapiens
cggcacgaggcgggccgacaagcagaccggaagaccgacggaagaccacaccccgagggagcccaggacaccacga

SEQ ID NO: 246076 - RNA, 75 nt, Homo sapiens
agcaacgccgggacagcgcaaggagagaacagaaagaccaagcagaagagaggacaaagcaccgggcaggcgcgg

SEQ ID NO: 246077 - RNA, 77 nt, Homo sapiens
gccccaccacccaggacaccagggcgagccaggagcggcagcccggccaggagggagggcacggaggaccagaggcg

SEQ ID NO: 246078 - RNA, 79 nt, Homo sapiens
accaccgaccaggaccgggaagccgcaaccgccaagaagcgagagaagaaaaacagaaaaagccaagacagaaacaaga

SEQ ID NO: 246079 - RNA, 76 nt, Homo sapiens
ggcccagaaacccaaaacgacagaccgggaaaggcggaaagagccacaagagagccccacagcgcggaggacggac

SEQ ID NO: 246080 - RNA, 81 nt, Homo sapiens
ggagaccacaaaagagcagaggaggaacaccaggcacaaggaagagggaggaacagcagcggaaacaagcacggacggcgg

SEQ ID NO: 246081 - RNA, 83 nt, Homo sapiens
gacgcccccaccacaccgggaggacagcccagagcaagcacacggaggcccgggagccagaccgggagcccgccccagccagg

SEQ ID NO: 246082 - RNA, 72 nt, Homo sapiens
gcccggggaggacgagcgcccgaagcagcggaccaacaaacagaagggaagcaggaggggggaaggcaggca

SEQ ID NO: 246083 - RNA, 68 nt, Homo sapiens
ccagcaaccaagagccaaaggcgaaacacaacggcagaggggcgggcaaaggagaggcacaggaagca

SEQ ID NO: 246084 - RNA, 88 nt, Homo sapiens
cgcggaccgcggacagcgaacccggagcacaccaaaagcagagccaaacgccaccaagagcccaacaacaccagagcgagcacggaag

SEQ ID NO: 246085 - RNA, 87 nt, Homo sapiens
cggggcaaacaggagggggcagcgagaccggaccaggagaggcccgcgggaccgaggccgggccccgggaaacagaacgacagcccg

SEQ ID NO: 246086 - RNA, 78 nt, Homo sapiens
ggacaaggaggggaacggcaaagcagggagcagagccagacagccaccacccggccacgaggcccagggaacccggac

SEQ ID NO: 246087 - RNA, 81 nt, Homo sapiens
gggagcgggccgcgcgcgcgggggcgaggcggacgcgcggcgcgccagaccagaaccgaccacagaccacgaagaccagcc

SEQ ID NO: 246088 - RNA, 75 nt, Homo sapiens
gaagaggcgaacaagaacccacaggagggccagaggacaaagcacggcggaagagaagccagccgccggcgacag

SEQ ID NO: 246089 - RNA, 83 nt, Homo sapiens
cggcgaagaggaaaaaaaacagaacaggaggggagagggcaggaaccaccgcccaaagaggaggcgcggaggaggaggaggaa

SEQ ID NO: 246090 - RNA, 70 nt, Homo sapiens
acggaaaaaccaggacgaaaagagagggccggccaacaaaagcccgggcggacgcaaggccacgggaagg

SEQ ID NO: 246091 - RNA, 78 nt, Homo sapiens
gcgagaaacgggaccgcaaagaacaggagcccacagaaggcagaggcagaaccacaggaccagaacagagaagaaagc

SEQ ID NO: 246092 - RNA, 74 nt, Homo sapiens
ccgcccagacggccaccggcgggaggaacaaaaggaccagcaaaggacaaagcagaaaaaacggcgcgggccgg

SEQ ID NO: 246093 - RNA, 101 nt, Homo sapiens
gcggagcgggcagccgccgccaccccgcggccgcacccccgccccaggccgaacgaggcggggggcccgagaccacaccacacccaccagggaggaccgga

SEQ ID NO: 246094 - RNA, 79 nt, Homo sapiens
agcagaggcggagcccgcagaccgcagaaggccggagacaccagcagcgagcacaacagcaccaggaaaggcccgaccg

SEQ ID NO: 246095 - RNA, 56 nt, Homo sapiens
gcagggaaggagaagagagcaagagcacgcagccgggggaggccacagcgagccac

SEQ ID NO: 246096 - RNA, 80 nt, Homo sapiens
cgcagggaccggcgcgcgggagcgcacggccccaacgaacagccagcaaagacaagagcagaccagcagccgcagcgcga

SEQ ID NO: 246097 - RNA, 66 nt, Homo sapiens
gaagccagccgacaagggcagaacgaacaggaacaaagccagacgggcgggaaaaagaaagccgag

SEQ ID NO: 246098 - RNA, 77 nt, Homo sapiens
gacaaaaccagccagccacaacccagcggagagcgcaacaagcgaccaggacgaaaagagccaggcagcgagcggga

SEQ ID NO: 246099 - RNA, 57 nt, Homo sapiens
gaaagggccacaacaacgggagcaggcaggacaacacagagaaccggaaagaacaag

SEQ ID NO: 246100 - RNA, 78 nt, Homo sapiens
cgcgccgaccacaagccagcgagcaccagaaagacaccagaagggacacagacaaaaagcgcgcagcaggagaaccca

SEQ ID NO: 246101 - RNA, 79 nt, Homo sapiens
ccgagccaacaggaccagcagggcgggcaggcccacacaggacccaaagacaggaccacgcaccagcagagaaggaaag

SEQ ID NO: 246102 - RNA, 60 nt, Homo sapiens
ggcggccccggagagagagccgcgcacgcacagacaagccgggacagaccggagcgggga

SEQ ID NO: 246103 - RNA, 79 nt, Homo sapiens
agaaacaagggagacagccgcccggccaagcacccgcagcaggaccaccagggccaggggccggaggcagcggcaggca

SEQ ID NO: 246104 - RNA, 86 nt, Homo sapiens
gccagggacgggggccaccggacaggccggcgcggaagaggccggcggcgggacggccccacgggacccgccccgaccacagcagc

SEQ ID NO: 246105 - RNA, 75 nt, Homo sapiens
ggaaaaccacccagccgggcagcgagccaagcggaccaggaaaaagcaagcagccgggcccggaaagccacgcaa

SEQ ID NO: 246106 - RNA, 62 nt, Homo sapiens
aggacacacagagagccaacaggagcggcgcccggaagcggcggagcggagccagagagacg

SEQ ID NO: 246107 - RNA, 70 nt, Homo sapiens
agagaggagaagaaaggagaagaagaccgagaggaacaaagacagaaaaggggaaggaacaaaccaaaga

SEQ ID NO: 246108 - RNA, 75 nt, Homo sapiens
agcggggagcgcccgcgacagaggagggaggaaaacaaccgagggcagaaggaaccagaagacacaaaaagacaa

SEQ ID NO: 246109 - RNA, 76 nt, Homo sapiens
gcgcagccgacgcgggaagaagcgggcgcgggcagcccagcggcagagccgaggacccgagcggcgcccaccgccc

SEQ ID NO: 246110 - RNA, 76 nt, Homo sapiens
gggcgccccaggaagggggaacacggagcgaaagagaacccgcgacagaagaagcagcccgaaaaagcacagagga

SEQ ID NO: 246111 - RNA, 86 nt, Homo sapiens
aacgagcccagcccaccgcagcgggacaccagcacaagggggagcgggccggagagaagagaggggcgcgaggagaaggaaacagg

SEQ ID NO: 246112 - RNA, 67 nt, Homo sapiens
gaaagccagcgcggaaacgcccgaacggacaccccccaggcacagccacaccccagcggccaaggac

SEQ ID NO: 246113 - RNA, 65 nt, Homo sapiens
caggcccagacagacagcacgcaggaaggccgcggacccccccccccccaccccacaggagaaga

SEQ ID NO: 246114 - RNA, 82 nt, Homo sapiens
gaagggccaagggacgccccacgccgcccgacccaggggagccgggcccccccgcccagcgcgagagggcggagaaggaaca

SEQ ID NO: 246115 - RNA, 89 nt, Homo sapiens
agcagcccccagagcgggaccacagcagaacagcccgggcccccacagcccagcccaaagccccaccccaagaacccccagcgggacag

SEQ ID NO: 246116 - RNA, 59 nt, Homo sapiens
gggcacccaccccgagaacgggacccaacagggggagcacagcaaagagaacagacccc

SEQ ID NO: 246117 - RNA, 76 nt, Homo sapiens
agcacaaagcaggcgcagacacacaggaaccagcacgaggggccaaggaggccccagcaggaacgagagcgccagc

SEQ ID NO: 246118 - RNA, 86 nt, Homo sapiens
cgcggcgcccccggcccggagcaacgagcgcagcgccgcacacaggacaggccccccagccaccagcggggcccacaggagggcac

SEQ ID NO: 246119 - RNA, 53 nt, Homo sapiens
gaaagaaagaagaggaaccagaaggagaagagcagggaaaacacagggaagcg

SEQ ID NO: 246120 - RNA, 37 nt, Homo sapiens
aaaagaccagagagaagcaagaacaagcagaaagcac

SEQ ID NO: 246121 - RNA, 78 nt, Homo sapiens
cggccgaaggcgaacgccgcggccaaggagccgccaaagccagacgccccacccggagacacgcccgagccaacccac

SEQ ID NO: 246122 - RNA, 76 nt, Homo sapiens
aaccgacaaggaagcccgaaagacgagcagaggccagaagaggaaagagagaaggacagaccacaaaaggagacac

SEQ ID NO: 246123 - RNA, 85 nt, Homo sapiens
aaccagcgagcgcagcggacccagcagccgcgcccaggccgcagcagcagggcgcccgcgccggcagaggaggcgagcacccgcc

SEQ ID NO: 246124 - RNA, 76 nt, Homo sapiens
agaaagcagcgcaaagaagccccgaccagacaagggaggcgaggacggacaaaaggaaacggacgggaggccagcc

SEQ ID NO: 246125 - RNA, 103 nt, Homo sapiens
cggacggaaacccagaacaagacacagaaacgcaaagaagacaacccacaacgaagaaaggagcacaaaagaacaaacacacgagccaaaagcacaaacaaga

SEQ ID NO: 246126 - RNA, 66 nt, Homo sapiens
gacaccagaaacaagggcgcccgcggagaagggcaaaaggccaaaacggaagaacccccgcaacag

SEQ ID NO: 246127 - RNA, 80 nt, Homo sapiens
cgccaaaacacgcccgacagaggagacacacagccccagacgggaggaaaaaaggaaggaccgcgacgaacacaaccaaa

SEQ ID NO: 246128 - RNA, 74 nt, Homo sapiens
gcagggcgcccccggaggagacagcaaggaagaagaaaagagagccaaggcggcaaaacccaaaaccagggcca

SEQ ID NO: 246129 - RNA, 73 nt, Homo sapiens
ccagaaggcggaaacagccaaaagaggcagaagcccgagccagaagaaacaaagaagacagaagccacggcag

SEQ ID NO: 246130 - RNA, 78 nt, Homo sapiens
gcgcgccgggagaccgcggaggccgacaggacgggcgccgccccgcgcggcagggcgggaagcgggggcacgcgcacc

SEQ ID NO: 246131 - RNA, 56 nt, Homo sapiens
gcccagcgggccggacggggcggggggaacggccaccgccgggggaacccggcggg

SEQ ID NO: 246132 - RNA, 93 nt, Homo sapiens
agccagccacaacccagcggagagcgcaacaagcgaccaggacgaaaagacaccaaagaggggaaccccggaaccagaggcacccaccacccc

SEQ ID NO: 246133 - RNA, 80 nt, Homo sapiens
caggacccgaacccgccgcgaggggcgagaaaggcccacgcagcccccaagcagggagaggcgccaccccagcggcacca

SEQ ID NO: 246134 - RNA, 73 nt, Homo sapiens
ggaaccggccagagggaaaggaacccggcagagagggccgggggaccggagccgggcccggcgcagaggggcg

SEQ ID NO: 246135 - RNA, 80 nt, Homo sapiens
gaaaccccgcccacagcacgagcaaaaacgcccaacagaagaggcgaagcaggcccaccaacacaccagaagcaagaacg

SEQ ID NO: 246136 - RNA, 66 nt, Homo sapiens
agagaacggcacccaggccaggcaccggccgccaccagggcacgaaacccacaaaccccagagcaa

SEQ ID NO: 246137 - RNA, 86 nt, Homo sapiens
agaccacgcagccacgcgggcgagcggcggggagcggcgaagccgcgggcgagggaaagggagcagcaccggccacacccacagca

SEQ ID NO: 246138 - RNA, 73 nt, Homo sapiens
aacaaagccaccaggcgcacaccaaacccccacgaggaagaaaggccccggagagggaggcaccgggcacgcg

SEQ ID NO: 246139 - RNA, 70 nt, Homo sapiens
aagaagacagggacagggcagccgacagggcgacgggacaaacacaggaaggaacacccggaccaaacaa

SEQ ID NO: 246140 - RNA, 86 nt, Homo sapiens
gcgggagcccggaggcccaggacccgacgggagagccgcagccagcaggggccaaggacaggaagcaggaccgcaggacaacggcc

SEQ ID NO: 246141 - RNA, 51 nt, Homo sapiens
ccgggacgacaccggggaccggacaggcaacgagggccaaccgccgcagca

SEQ ID NO: 246142 - RNA, 77 nt, Homo sapiens
gcgcaggagacggagcgcgcgcgggaagaggcccgaagagaagccagccgaggcgcgcccgcagcggaggcagcccg

SEQ ID NO: 246143 - RNA, 71 nt, Homo sapiens
aagagcgggacacgacccgccagagcagccgaaggacacgggacccaggccacgggccggggcccccaccg

SEQ ID NO: 246144 - RNA, 70 nt, Homo sapiens
gccggccggaaagcacacaggcgggaaagccccggggcagaagagcggcgccgaggagaaggaaaaagac

SEQ ID NO: 246145 - RNA, 50 nt, Homo sapiens
gacacgccggacccccccggaaaaagaagggacaaggaggaggacaagaa

SEQ ID NO: 246146 - RNA, 74 nt, Homo sapiens
aaagagcagcacaccgggaaacggggagcagaaacgggagaaaggaaagaagaaggcaacaagcaaggaagacg

SEQ ID NO: 246147 - RNA, 67 nt, Homo sapiens
caacggcgagaccgcccacgagaaccgccgacgaccaacccacagaaaggcagagaaagcaagagac

SEQ ID NO: 246148 - RNA, 87 nt, Homo sapiens
ggccgagccgggaccaggcccgggggcggcggccacgccaaggacggccaaaacacaggagaagaggggaagacaccaaagacccaa

SEQ ID NO: 246149 - RNA, 57 nt, Homo sapiens
agcaacaagagcccaacaaggaaacccagaaaaaagagagacccacagagaagagcc

SEQ ID NO: 246150 - RNA, 91 nt, Homo sapiens
caaggacagcgcgagccaggacccgaccgcgaccgcacaagcagccgccagcggaaccaagcggcgcggcacacgagaccagggcggcacg

SEQ ID NO: 246151 - RNA, 85 nt, Homo sapiens
ggccagggcaaggagagaaaggacagaaaggagaaccagcaggggagccccgccacaggaccaggcaccaaggaacaccgaccag

SEQ ID NO: 246152 - RNA, 58 nt, Homo sapiens
ggcggcggggcagcagaggacggcaccaccccaaaacgagacagggcagcaggccccg

SEQ ID NO: 246153 - RNA, 67 nt, Homo sapiens
aagaagccggacgcacgcacgcgccggaccagggaccgaagacggacacagggagcccaaaggggag

SEQ ID NO: 246154 - RNA, 43 nt, Homo sapiens
ggagcggagcagccaaagaggcaccaagaagagagaaagagac

SEQ ID NO: 246155 - RNA, 74 nt, Homo sapiens
aggaccgagcgacagcgcacggcagcggcaccacggcgacgcacaagcagcggccgccagcagaaggagggagg

SEQ ID NO: 246156 - RNA, 75 nt, Homo sapiens
ggaggacggcacaccgcggcggggggccagcgagacgccacccgagcgccccaacagaaagagagacagagggga

SEQ ID NO: 246157 - RNA, 75 nt, Homo sapiens
cccaccggagacacaggaacaaacgagcacgcaaggagggcagaacgacgaaagacggacaggacgagggagagg

SEQ ID NO: 246158 - RNA, 79 nt, Homo sapiens
cgcaccagaacgcccgcgcacgagccagaggcaagcaaaacagacaaacaagcgagaacaccgaagcggaaaagcgaag

SEQ ID NO: 246159 - RNA, 83 nt, Homo sapiens
ggcaacaggaaagcaagggaaggcgccccaacaaagggacagggcagaccgccagcagcacagcaagccacagagagggccgg

SEQ ID NO: 246160 - RNA, 77 nt, Homo sapiens
ggcaagcacagaaaagaagcaacagaagaagacgaccgggcagccagaacagcacacagcaccggacggcacacgcc

SEQ ID NO: 246161 - RNA, 66 nt, Homo sapiens
gggaggaacaaggcggaagaaacggggcccgagcccagaggggaaaggagccaaaaccgcaggcag

SEQ ID NO: 246162 - RNA, 84 nt, Homo sapiens
ccgcagcccgagccgccccccgagcccgcccccgaggcgcagaagggagagaacgccaaaagacgaacacaaagggaaagagga

SEQ ID NO: 246163 - RNA, 68 nt, Homo sapiens
ggagaaggacgagacacaaggaagcgacaggcaacagacggggcgcggggggccaccaacacccccgg

SEQ ID NO: 246164 - RNA, 79 nt, Homo sapiens
gaaggacacgagaggaaggacggagaaggcaggggcaccgaaggcgcgaaggacgaggacgcggagacggagccacaag

SEQ ID NO: 246165 - RNA, 88 nt, Homo sapiens
gccgccgccgcccagagacgcgagcccgccgccgccgccaccacccacccggacacagcaagcggaggagacgcagcccggacccacc

SEQ ID NO: 246166 - RNA, 68 nt, Homo sapiens
aagaaagacccgcggggacgaggaaaacacccaagaagcggaggaaaacggcacggcagacacaccga

SEQ ID NO: 246167 - RNA, 81 nt, Homo sapiens
agccaaaacaacaggagaaaagcacgacacacggcaacgggaaacaggagaacgaggcacagcaagaccacaaaccaaaag

SEQ ID NO: 246168 - RNA, 74 nt, Homo sapiens
agaaaaccagaagcacaaggacagagcacccaccacaggagacggcggaaaacccgaagcagaagcccgacaca

SEQ ID NO: 246169 - RNA, 67 nt, Homo sapiens
aaccaggaacaagaagacaacagagcagacaggaaaacaagccgacagaagaaagcagacagagaga

SEQ ID NO: 246170 - RNA, 74 nt, Homo sapiens
cgcggaacacggaaggcgcaccaccacccacagcagaccaaggaagcggcgcccggggaacaaagcgggaaagc

SEQ ID NO: 246171 - RNA, 81 nt, Homo sapiens
gcgggccagccgccaaagaccccgccggagaaacagaggccacccaggaaggggcagccggaggaggagggcgaccagcag

SEQ ID NO: 246172 - RNA, 54 nt, Homo sapiens
gaaagagggacagccgcacggaggcgaaacacaaaggggggccgggagaggaaa

SEQ ID NO: 246173 - RNA, 65 nt, Homo sapiens
aacaaccacagcaagccccaacacccgaaagagcgaaagcccagacaggaagcaacgagggagaa

SEQ ID NO: 246174 - RNA, 90 nt, Homo sapiens
aggaccgggcagcagcagcagagcggcgagagccccccacccggaagagcggcggcaaccggaaacaagaccgcgcacgggagcgcaagg

SEQ ID NO: 246175 - RNA, 76 nt, Homo sapiens
aagaaacaacgaccagcaccagcaaaccaaaccagggaacggagcagcaagaagaacacagagccagagaaaaaaa

SEQ ID NO: 246176 - RNA, 55 nt, Homo sapiens
ccacccacgagaccagagagggaaccacaaccccaccagccacggggaaaaggaa

SEQ ID NO: 246177 - RNA, 56 nt, Homo sapiens
gggcaggcacccaggagaggacagcagccggcaagagccccggggcggaaagaagc

SEQ ID NO: 246178 - RNA, 75 nt, Homo sapiens
acaaaacccaggccccaagagcacaagagagagaaggccgaaaaccgcaaacaggaaaagcgcagacgcacagag

SEQ ID NO: 246179 - RNA, 78 nt, Homo sapiens
agagaaacccacccaggaaggaaaggagccggaggcggcggaagccccgcccaccaggccaacaaggacccaaggaca

SEQ ID NO: 246180 - RNA, 67 nt, Homo sapiens
cagccaggagagcaagcaaaagggggggccgcccgcccaaggcaggaagaggggccgcaaagaagac

SEQ ID NO: 246181 - RNA, 79 nt, Homo sapiens
ggaacagacacggggaagcgcaaaaacaagacggggcgccccacagaggggcgacggaccggggcggccgagccgggag

SEQ ID NO: 246182 - RNA, 69 nt, Homo sapiens
gcagagggaaccagcggacgcggaggcccaaccgaagaaaacaaggaccgacccaaccgaagaaagcca

SEQ ID NO: 246183 - RNA, 81 nt, Homo sapiens
ggccaagacagccgaaaacagggacagcagaaaggagaggcaggagcaaagagcaaagccccccggcccgagggagccagg

SEQ ID NO: 246184 - RNA, 97 nt, Homo sapiens
ggcccgaacaccgcgcccggaagcccgcggccggaggagccgcaggggcccggacaaggagggggggccccagcccggccgaacgggcgcacgacac

SEQ ID NO: 246185 - RNA, 77 nt, Homo sapiens
gcgggcaccgaggacccgcccgcccagcgacgggagaaacgcaggaagaggaaaaagacccgccccagaccaacggg

SEQ ID NO: 246186 - RNA, 82 nt, Homo sapiens
agaagcgggcgcagcacagaacgccaaaggcccgcaaggacaagggggaggaagcagggccaggcacaaccagaaggagaga

SEQ ID NO: 246187 - RNA, 80 nt, Homo sapiens
ggaaagccccagagacccaaaacaagaaaacacagcgggaagaaggaccggggagacaggaacacgggcaagacagcgcg

SEQ ID NO: 246188 - RNA, 77 nt, Homo sapiens
cacaccacagccgccggggaccgccaccccgcaggccccggcagggcaggacaggcacccgaaccgaagcagaaccg

SEQ ID NO: 246189 - RNA, 69 nt, Homo sapiens
cccaaaggagcgacaaaaaccgccgggcgagcagcgcgcaaagagagaaggcgggaccaagaagaaaga

SEQ ID NO: 246190 - RNA, 40 nt, Homo sapiens
cacgaggccgccacgcagagccaggacgccccaaggcccg

SEQ ID NO: 246191 - RNA, 100 nt, Homo sapiens
ggccagccccggggcagggcaagcacgggaagaagcagcggacccgccaccacaggcaccggagcccggcggacacggaaggaggcccaacaagcacgag

SEQ ID NO: 246192 - RNA, 76 nt, Homo sapiens
aaaacacaggcggggacggcccgagcggggaggagacaaaggagacgaaaaaaaggccaacacccggaaagccggc

SEQ ID NO: 246193 - RNA, 79 nt, Homo sapiens
cagaagcggaacagccacagcagcccccaaggagcgcaaggaaaacaggacaggagaagaacacccccaagagcaaccc

SEQ ID NO: 246194 - RNA, 74 nt, Homo sapiens
ggagagaagaaggcaagcgacggcccgaacgagcggaggccaacaaaggacaacccgccacaacgacaaaggac

SEQ ID NO: 246195 - RNA, 78 nt, Homo sapiens
gaaccaggcagcagagggaaaccaggcgaaaggcgaaggagcaagagacagccgcaggccagaacccagccgaaaaca

SEQ ID NO: 246196 - RNA, 69 nt, Homo sapiens
agacccgcaccaccgcacaccgagcagcaaacgcacaggagcaaaaggacagacacggcagggaaacca

SEQ ID NO: 246197 - RNA, 81 nt, Homo sapiens
ggccgggaagccaacgaccacacgcaaaaagaaacgaagccgggcacggacaggacagagaaagcaggcgccagcgacccg

SEQ ID NO: 246198 - RNA, 37 nt, Homo sapiens
cccccgaagcgggacacaggcgcagggccagccgaac

SEQ ID NO: 246199 - RNA, 58 nt, Homo sapiens
gacagccggcagggcggggcaggggaagggacccgcgaggaggagagaaagaaagcca

SEQ ID NO: 246200 - RNA, 76 nt, Homo sapiens
caagcgcagcacgacagagggacagcacccccaacaccgggccagaagggcgagcacacaggaccccaagcccaag

SEQ ID NO: 246201 - RNA, 76 nt, Homo sapiens
ggaaggagcccgcaacggcgccgcccgaccccaagaccagagccgggaccccagccagagcaaacgagacggaaga

SEQ ID NO: 246202 - RNA, 81 nt, Homo sapiens
acggagacgcagagggacgaaagaagcgcagcggaggaaggcgagagccgcccacggaaccacacagagagggaccgcacc

SEQ ID NO: 246203 - RNA, 73 nt, Homo sapiens
gcagagaaaaccgccaacaagagagagggccccccacccggcgccccgggccagcgggacaccagcaagcagg

SEQ ID NO: 246204 - RNA, 84 nt, Homo sapiens
agcagcgagaaaggagccggggaccccccaaagacaagcagggagaagaggagagagcagccaggccccggccgagcccgcccg

SEQ ID NO: 246205 - RNA, 71 nt, Homo sapiens
cggcagaacgccccacaagagaaacgccagcccaacgcagcgaccaacacgccgggccaacagcagccaaa

SEQ ID NO: 246206 - RNA, 79 nt, Homo sapiens
gaggggcgagcccagagggacaagcggcccacacgggacggcgcggccacccgcagccccccaccgggcaggcgggagc

SEQ ID NO: 246207 - RNA, 54 nt, Homo sapiens
aaccgaaaagccacaaagggaaccaggaaaagggcagggaggccaccagggcgg

SEQ ID NO: 246208 - RNA, 81 nt, Homo sapiens
caccgcgcacggcaacagaccagcaggacaccccggcacaccacggggcgccaccagcggagggagcgagcccccgcggcg

SEQ ID NO: 246209 - RNA, 78 nt, Homo sapiens
gcgacgccccaggggaaaacccccgggaccaggggaagaagacaccggaaaaagcagaagcaacgggccgagacccga

SEQ ID NO: 246210 - RNA, 92 nt, Homo sapiens
gaacggggaaagcacaacaagacacgccaccagaaacagcagggcacggggaagagaaggagacccaacaccccggccagacgggccaccag

SEQ ID NO: 246211 - RNA, 69 nt, Homo sapiens
accagaggaggaagagcaagcgggggaccgaacaaggcaaaaggggaacaagggggcgcaacagcccag

SEQ ID NO: 246212 - RNA, 62 nt, Homo sapiens
aaacaccagagagcggccaacaaaagcaccaccaaggaaagaaccgggccccccgggcgagg

SEQ ID NO: 246213 - RNA, 55 nt, Homo sapiens
gaggacaaagaagccacgaagcaaaaagacccccaagacaggagcgcgaaagggg

SEQ ID NO: 246214 - RNA, 77 nt, Homo sapiens
cggggaaaaagagagcgaagaacgcaaaagaaacggccccagcaccagggagcggccgccacgccagcccagccggg

SEQ ID NO: 246215 - RNA, 82 nt, Homo sapiens
aaaaagaggccaaagacgacagaacggcagcggagaaaacaaccaggccccaaaagaagaagggcaaggcgagcgaagagaa

SEQ ID NO: 246216 - RNA, 73 nt, Homo sapiens
ccggcaagagggagaaggacaccaggcagaggcaagaacaacgagagccaacaagccgggacgggggcggagg

SEQ ID NO: 246217 - RNA, 83 nt, Homo sapiens
acagacgacccccgggcacaaccagccggaaggaaagcgcaggcaggagaaggacagcagagccacaagggacgcaaaaagaa

SEQ ID NO: 246218 - RNA, 85 nt, Homo sapiens
gcgcggaggcgggagcgcggaaacggaaccgggaggcgacgcacacgagcggaggcgaaggcagcccaagagaacgaaagcaaaa

SEQ ID NO: 246219 - RNA, 66 nt, Homo sapiens
ccgccccaagaagccagcccaggaagggggcaaggcacccgagcgaacgggaagccacggcaggcc

SEQ ID NO: 246220 - RNA, 68 nt, Homo sapiens
aagggccaaagaagggagagaggaaaccccacagcaacagggagagaaaagccccgaaaacggagagg

SEQ ID NO: 246221 - RNA, 57 nt, Homo sapiens
gggaagcacaggaccggaggcaggaaaggcgagaggaggagacgacagaaacaagac

SEQ ID NO: 246222 - RNA, 76 nt, Homo sapiens
aggccgagggcaggacccgcaggccagaccccgggagcccagccaccacagacagggaccagaagcagcagcccca

SEQ ID NO: 246223 - RNA, 92 nt, Homo sapiens
ggagaagccccgcacagcagagagcaacccgaaaagagagcagagaacacggggacggccggagcccggagccgggagaacgagcaaaagcg

SEQ ID NO: 246224 - RNA, 82 nt, Homo sapiens
caccggaagaccccgaaggaaaaggaggaacgccggcccgagaaagcccgccagcaggaacaagcagaaagcacgaacaacg

SEQ ID NO: 246225 - RNA, 57 nt, Homo sapiens
cacgggacgcagagccccggaaagacccaagggaaaagaaccaggagccgccagcgg

SEQ ID NO: 246226 - RNA, 85 nt, Homo sapiens
cagggcggcgggccggacgacaacaaaaccccggacaagaaagccagagaaacgacaccagggccgccgcacaagacccagcccg

SEQ ID NO: 246227 - RNA, 75 nt, Homo sapiens
cgggcgggccggcgagcgcagcgcgaccgggaggcccagagcacccacgggccagaaaacaagacgaagaggacg

SEQ ID NO: 246228 - RNA, 74 nt, Homo sapiens
acaccgagagaggaggagccagacgacaagcacacacaggcgcgaaacggaaaaagagcccaaaagcaaagcag

SEQ ID NO: 246229 - RNA, 84 nt, Homo sapiens
acaaaacaaaccgaagggcgacggacaggacccagaccagagggcaggaggcagccgaagaagcaggaaggccggaggggaaga

SEQ ID NO: 246230 - RNA, 73 nt, Homo sapiens
cgaagcaaagaaccacaggcacaacgaggggaccaggaaaaggccgaagaccccagcaaccagcggaggggcc

SEQ ID NO: 246231 - RNA, 70 nt, Homo sapiens
aagcaggaaaggccggacaccagaaacaacgaagcaagcccaagggcgcaggggcaacacaaaggcgacg

SEQ ID NO: 246232 - RNA, 42 nt, Homo sapiens
cgacgaccgacaggggggaaaggacccaaggccagccagccc

SEQ ID NO: 246233 - RNA, 67 nt, Homo sapiens
cagagcaaagacccggccccccccaacaggggggaccgaaccaacggcgacgaaagcgcaggcaggc

SEQ ID NO: 246234 - RNA, 57 nt, Homo sapiens
aaggggaagagaaaagagcagccaaggcagcagaagaggagacagaagccaggggca

SEQ ID NO: 246235 - RNA, 59 nt, Homo sapiens
accagaacgacaaacacacagccagacccacagagcgcgagacgaaaaaaggccaaaag

SEQ ID NO: 246236 - RNA, 81 nt, Homo sapiens
aaggcgcggcacggcaacaccgacaaggcaacgcagccacaggcggggagaggaagcacccgcgagaaagaagggcacagc

SEQ ID NO: 246237 - RNA, 38 nt, Homo sapiens
ccccgagaacgggaacaggccccacggcaccgcagcga

SEQ ID NO: 246238 - RNA, 53 nt, Homo sapiens
ccgcgccccaggagggcagccggcacccgcacaacccagggggccgaacccag

SEQ ID NO: 246239 - RNA, 73 nt, Homo sapiens
ccacccgacagcaagcaccggagggagaagacagacgaaaccacaaaacgcccaccagcacagcggcagaaac

SEQ ID NO: 246240 - RNA, 63 nt, Homo sapiens
cgcaaaggagcccagagacaccagaagggggggccgcccgcccaaggcaggaagaggggccgc

SEQ ID NO: 246241 - RNA, 69 nt, Homo sapiens
ggaagcgcagcaacagcaagccccgggcagaacaaacggacccaggacaaaacgacaccagccaaacca

SEQ ID NO: 246242 - RNA, 73 nt, Homo sapiens
gcgcccccacccggaggcccgccggccccgggcaccaacggacaaccaggcacgggacaaccagcacggagca

SEQ ID NO: 246243 - RNA, 78 nt, Homo sapiens
gcagcagaaagcaaaccagcaggcaccaaggaaagcagaagacaaagcagagggaaggcaacacgagcggaagaacac

SEQ ID NO: 246244 - RNA, 48 nt, Homo sapiens
cgaccgagccgaacaacgccggccgcggcccccagaagagcacccagc

SEQ ID NO: 246245 - RNA, 74 nt, Homo sapiens
gggaagccaggaacagcggggcacagacccaccagaacccgaaaacagggccaaagcaggaaccccagaagaaa

SEQ ID NO: 246246 - RNA, 76 nt, Homo sapiens
gccacgcaagacaaccaacaaggccgcgccagaacggaaggggcccccggcgcagcagaggcgcagagaaacgaag

SEQ ID NO: 246247 - RNA, 78 nt, Homo sapiens
cagagcagagacgaaaaaggaaaaagaggccacagaaggccagcagacaaagagcccaggacaccacagacagacaag

SEQ ID NO: 246248 - RNA, 73 nt, Homo sapiens
gacgcggaccagacaggaaaagcacaaccagccaagggccacagccaccaccaacaacaccagggacacaaca

SEQ ID NO: 246249 - RNA, 82 nt, Homo sapiens
acagcggagcaaaacagaaaaagaaaaggcgacgaaaggcaagaagacaccaggaaaacaagggggcccccaaagggaagcc

SEQ ID NO: 246250 - RNA, 81 nt, Homo sapiens
aaacagaaccgaaggggaagcgcccggcgcccgcacggggggacacagcgagccacgcgccaggaagcccggccaaggagc

SEQ ID NO: 246251 - RNA, 52 nt, Homo sapiens
gaggcgcgcggggccgaggccgccccgagcgccagaacccaggagaaacgag

SEQ ID NO: 246252 - RNA, 65 nt, Homo sapiens
ccccgcagcagcagcccaaaggaaggaaaaggaaaccagacgacaaaagaggaaaaaagccagag

SEQ ID NO: 246253 - RNA, 82 nt, Homo sapiens
caaccacgaacccggacccccacccaggccagggccagccgccagacgaacgaacaaagaacaccaaaaaccaccaaaccag

SEQ ID NO: 246254 - RNA, 54 nt, Homo sapiens
gaaaacccaacgagaccaaagaggcaagaacggagcggagcccagaaggggaac

SEQ ID NO: 246255 - RNA, 78 nt, Homo sapiens
gccaggagaccaaggaccagccaccacggagaacacaccgacaccacaccgagcagagagcagaaggaaacagggaaa

SEQ ID NO: 246256 - RNA, 77 nt, Homo sapiens
gcgacagggaggcgggacagcaaggcagccaagccagcagaggcaccccaggccacgggaaggagccggccaggcca

SEQ ID NO: 246257 - RNA, 72 nt, Homo sapiens
gcgggagcgcgcccgccgagcgcaacagcggcgggcggggcaccccaggcaccagacacgaaagagcagaag

SEQ ID NO: 246258 - RNA, 86 nt, Homo sapiens
gccaaaccaagcggcggaagaaaggggccaaagggcgagggcacaaaaaaccacaccccccaccgaggaagagcgggagaaaggga

SEQ ID NO: 246259 - RNA, 80 nt, Homo sapiens
gccacccgcccacaacacaagaaggggccagccccaccccaaccaagacaaacgggagcgcacagcccccccgagcgcgc

SEQ ID NO: 246260 - RNA, 56 nt, Homo sapiens
ggaggagcaagccgaggagaggcaagcgcagcggcggccgcgcccaccggcaggga

SEQ ID NO: 246261 - RNA, 88 nt, Homo sapiens
ccagggacccccggcccgcggccccccggcccccggcccccggaccccagggaagcggggggagacggacgaggagaccacagggcga

SEQ ID NO: 246262 - RNA, 82 nt, Homo sapiens
gcgcagccagaacggaggaggagccgcagccaaaagggaaagaaacgcggcaagaaagcgacccgagggccaggaacagaag

SEQ ID NO: 246263 - RNA, 60 nt, Homo sapiens
ccgggaggaccagggaagcaggaaaagagagagagggcaaggagccacaagccacgaccc

SEQ ID NO: 246264 - RNA, 81 nt, Homo sapiens
ggacgaggccgccccaggcgcccgacgcggaccccagaccaaggaaacaacaggaagccaccaaggcacagaaggcccaga

SEQ ID NO: 246265 - RNA, 69 nt, Homo sapiens
ccaacggaccagccacggcgccaaagagagggcgaacccccccacggcaagcaacccagacaaccacga

SEQ ID NO: 246266 - RNA, 81 nt, Homo sapiens
caagcaagggacggcacccgagggcgcggcgaaggggccagcagcccccccgagggcgcagcaacgaggggcccaggagga

SEQ ID NO: 246267 - RNA, 74 nt, Homo sapiens
agcgagcggagggcgcggcgcgagaacagacagggacaaaagggaccggaacggaggcaccacccggcggaacg

SEQ ID NO: 246268 - RNA, 71 nt, Homo sapiens
ggcgggacgcgagggccaagcaggagggccaggaaggacagccagaccaggaaggagagcccggacccacc

SEQ ID NO: 246269 - RNA, 64 nt, Homo sapiens
gacggaaaaaccagccgcacgccaaggaaacagaacgcaacccaggagccccgggcggacaggg

SEQ ID NO: 246270 - RNA, 71 nt, Homo sapiens
caggccagcgccccccagggagcaccggaagggagcgggcgccaccaggggccagaaccgcccacggcccc

SEQ ID NO: 246271 - RNA, 72 nt, Homo sapiens
acggcaagccggggacaaggacccaggaagccacccgcagaggggcaaggagaaagggcaaacgcagcacac

SEQ ID NO: 246272 - RNA, 66 nt, Homo sapiens
gacgcacacggaagaaacgcaacccaggcgcgaccagccacagaagccagccaacacagcaggcgg

SEQ ID NO: 246273 - RNA, 68 nt, Homo sapiens
cgggaagcgggagcaggggggaacccaccaggagagagaggcggaagaggaaaacacgcaaaagaagc

SEQ ID NO: 246274 - RNA, 69 nt, Homo sapiens
acagcagccaaccaggcccgagacaaaaagggcaaagaacagacacccagcgacgaaagcagagcccac

SEQ ID NO: 246275 - RNA, 82 nt, Homo sapiens
gaaaggaacagcccggcacagccccagcggagcgacgcagaagacggggacgcaccacgagagaaccgacaacagcgcccag

SEQ ID NO: 246276 - RNA, 80 nt, Homo sapiens
gccgccagccgaaggaggaagggaaccaacccacccggcgccgcggcccaaaaggagcaccaggccaagaaccccaaaaa

SEQ ID NO: 246277 - RNA, 77 nt, Homo sapiens
aagcacaacgggcgagccggccacaaagccgacaaggcacgacggcgcggacggacagaaggaacccccaccccgcg

SEQ ID NO: 246278 - RNA, 73 nt, Homo sapiens
agggcagcaccaccccaagaggagcagaccaaagaggggaagccgggcgcccgggagacacgcaagagcacca

SEQ ID NO: 246279 - RNA, 74 nt, Homo sapiens
cgggaagaaagccccaccgagcacagggccagcggaagggaccacagaccagcacgccggcgccacgaaccgag

SEQ ID NO: 246280 - RNA, 67 nt, Homo sapiens
aagaacacagccgaaacagacgagccaagaagggacacagacaaaaagacaggagcccaagagaacg

SEQ ID NO: 246281 - RNA, 77 nt, Homo sapiens
cgcgcgggcacccacggagccccggggcggggagacacaagaccggcggccacgcaccccccaagaagaggcaccca

SEQ ID NO: 246282 - RNA, 75 nt, Homo sapiens
cggaaagccgaaggccgcagacgacccgagggagcgaacggagccaacggagagacggcagagagaacagcaaaa

SEQ ID NO: 246283 - RNA, 58 nt, Homo sapiens
gcgaacccgccacgcagcaggagcaggggacgaagggggcccggaaggaagccccgga

SEQ ID NO: 246284 - RNA, 62 nt, Homo sapiens
aaggagaaaaaaggaaaacggcgcaacacaccagaacagcaaggggaaggccagcccccacg

SEQ ID NO: 246285 - RNA, 75 nt, Homo sapiens
cagccagaagggaaaccccaccgcaaggacagggaaggagccccacgaggaccggagcccccacccgagcaaccc

SEQ ID NO: 246286 - RNA, 65 nt, Homo sapiens
ggacggcggggccgggcccccggccgcaagcaggacaccagcagccgcaacggcacacacgcccg

SEQ ID NO: 246287 - RNA, 54 nt, Homo sapiens
agacgcaaaggcaagacacgacaacgggaaaggggcacaaggaccagcgccgag

SEQ ID NO: 246288 - RNA, 60 nt, Homo sapiens
cgcagacacagggcccacacccaagcccgcccgacgaaggagaagccgaaagaaaagaac

SEQ ID NO: 246289 - RNA, 69 nt, Homo sapiens
gcagaagccggaagagagccaagccaggcccagcagccgccaccggcagaccaggggaccccacgggaa

SEQ ID NO: 246290 - RNA, 80 nt, Homo sapiens
accagcccagcagggaacgggcagggcaccggagcgcgcggacaggccacaccagagaaagcaagggccaaagcccggaa

SEQ ID NO: 246291 - RNA, 102 nt, Homo sapiens
acacgggaagagcgagaagaaacaggaaaacagacagaggagacaggcaagccgggaacccaacaagggagcaaacagagaaagaacccaaacacacagaaa

SEQ ID NO: 246292 - RNA, 81 nt, Homo sapiens
cgggcaccgcggccggagcggggcgaggaccccaagagcagaagcgaagacaaagggcgaggcggcgccggacacgacgag

SEQ ID NO: 246293 - RNA, 94 nt, Homo sapiens
ggcgcggagggccgagggagggccgagccagccgcggccggaggagcccccaggccacaacggcaagcggagaagagcaaggccgaaccgagag

SEQ ID NO: 246294 - RNA, 74 nt, Homo sapiens
aagaggaggcccccgaggacgcgcaggcaccaacaggaaccccgacagcagagacgacgcggcaagcagcggaa

SEQ ID NO: 246295 - RNA, 80 nt, Homo sapiens
cagaagcaaggaagcgggcaagccgacagggcaagcagcaccagcagcgcgaaacggccgcagaacggggcaagcgagcc

SEQ ID NO: 246296 - RNA, 74 nt, Homo sapiens
gacgcagggcgcccccggagcagcggccacgcaggaacgccgacccgggcaggggccgaagaggccggacgcgg

SEQ ID NO: 246297 - RNA, 65 nt, Homo sapiens
gcccgggggaagagccgcgacacgcggagggaaggacaagcagccaagcaccacaacagcagaga

SEQ ID NO: 246298 - RNA, 81 nt, Homo sapiens
accccaagaaagccaccgggcgcaccgcgggcggacccagcacgccgggccgggggcgcagcaggagaaagaagaaacaaa

SEQ ID NO: 246299 - RNA, 69 nt, Homo sapiens
aaggaccaagaaccagaagaggagaaaccggcaaagagaagcaacacaagaagaccaaaggagaaaaac

SEQ ID NO: 246300 - RNA, 79 nt, Homo sapiens
ccagccacaaacacagaggaagaccaccaggcagaggcaacagaggagcaacaaggagacagcccaagcacaaaacaac

SEQ ID NO: 246301 - RNA, 81 nt, Homo sapiens
aaggcaacgccgcgcccacacaggcagacgccccgagggcccgcgccgagcccacagccgagccggccgagagagacggcg

SEQ ID NO: 246302 - RNA, 77 nt, Homo sapiens
gggcgcccaggccaggccagcggggccagcccgcaacccccggcgaccacgggcccggcaacagcgcagcggggaca

SEQ ID NO: 246303 - RNA, 59 nt, Homo sapiens
gggaagaaagagaaagcaggaagccagccagagcaggcaagaagcaagcaaccaggcgc

SEQ ID NO: 246304 - RNA, 57 nt, Homo sapiens
ggcccggagcgggccaccggacagcgcaccgggcagccgcgagccggggggaacccc

SEQ ID NO: 246305 - RNA, 71 nt, Homo sapiens
gaagccgagggggaaaaggaagaaccagagaaagggagcagggagcaagcccaaaccagaagcaccagcgg

SEQ ID NO: 246306 - RNA, 64 nt, Homo sapiens
cacggccccccccggcggggcaagaggcaacagaggcacaaacagcagacaaaaggaaaaaggc

SEQ ID NO: 246307 - RNA, 76 nt, Homo sapiens
ccgcggggcggccgccagcacaagcgcacccgcacaggggagagggcacggaaagaccaaggaggcgcccaggaag

SEQ ID NO: 246308 - RNA, 73 nt, Homo sapiens
cgccaccggcacaccgaagggccagcaacagaagaaagcaagcaccggggaaagcggcccgaaacaagcagaa

SEQ ID NO: 246309 - RNA, 77 nt, Homo sapiens
ccccgccggcgcgcccgcgcggcgcggggaccgcggcccgagagaagaagaaggaggccgcggccagaaacccaaga

SEQ ID NO: 246310 - RNA, 86 nt, Homo sapiens
ggaaaacggagacgggcggccggcagccaaaaaccacagcgcacacaggacaccgacaagacacaaaccgacacggcaggggagag

SEQ ID NO: 246311 - RNA, 107 nt, Homo sapiens
cgccgggacacaccccaggaaaaagacagcccgcagcacgaccagcaggaacgaaacaagggccgccgccgggggggcgggggcccccccccccgagacaaggaggc

SEQ ID NO: 246312 - RNA, 42 nt, Homo sapiens
ccccgcccccgcagccgccaagggaaccggggaagcggagcc

SEQ ID NO: 246313 - RNA, 57 nt, Homo sapiens
cagaacagcgaaacaagagacaacaacagcggccagaccgcaaaccaagaaacagag

SEQ ID NO: 246314 - RNA, 68 nt, Homo sapiens
aaggcaggcaccacaaaaaggacagcacagcaaacgacaaggcaggagggggaaaaacgcgaagaggc

SEQ ID NO: 246315 - RNA, 49 nt, Homo sapiens
caacacggggaaagggcacgggaacgaggaaacaccgggaaaaccaccc

SEQ ID NO: 246316 - RNA, 98 nt, Homo sapiens
ccccgaccccgaccgcggggccggacaagaaccgaccgagagggagcgaaaagggcgacagcaagccagggggcagagacccgggagcggcccgcccc

SEQ ID NO: 246317 - RNA, 70 nt, Homo sapiens
cgagcacggcaacgaaccagcagcaaaagcagacacaggagccagggagccaggacgcagaggacagaaa

SEQ ID NO: 246318 - RNA, 81 nt, Homo sapiens
ggcccagaccaaaaaaccacagagacaagggaaggcgaggcggcgcacaaggggacacccagggccacggggccaggggcg

SEQ ID NO: 246319 - RNA, 53 nt, Homo sapiens
cccgccaccacccaaagagaagacagcccaacaaggcgggacgacaacaccac

SEQ ID NO: 246320 - RNA, 76 nt, Homo sapiens
cgccacgccacacggcccagacaccgccacgaggcacagcacgccaagaggaaaccagggcgaccaggagagaaga

SEQ ID NO: 246321 - RNA, 97 nt, Homo sapiens
cgacaagccgcggcagccgcggaccaccgccgccaggaaccccccacggaaaggacgaaagaaagaagcagccccagaaagaaggacgccgcggccg

SEQ ID NO: 246322 - RNA, 82 nt, Homo sapiens
ggccgcggccggggcaggagcgcaggaagaaaacaccggagcccaagacaccaaaacagacgcaggcaagaggcagaaggac

SEQ ID NO: 246323 - RNA, 38 nt, Homo sapiens
gaacacaaaacagacaagccagccccgagagcgcagac

SEQ ID NO: 246324 - RNA, 68 nt, Homo sapiens
caaaaaaacgaaaccggagcaacccacgacccaacaccacaggagaaaaggcccgacagaagccaaag

SEQ ID NO: 246325 - RNA, 77 nt, Homo sapiens
gggagaggcggcgcgaggagcagcgaaaacggggagagccggaccccagggcgaggaacccaacaccccaggaggac

SEQ ID NO: 246326 - RNA, 79 nt, Homo sapiens
cccgggcgccgccccagcggagggcagccccgagccaggcccgccgccgagcgaggcccccgccaggccgcagagccgg

SEQ ID NO: 246327 - RNA, 72 nt, Homo sapiens
ccgacagacaaaacgaaacaccagaagggaggaagacgggcaaaggagccgaagcaacacaccccgcgaacg

SEQ ID NO: 246328 - RNA, 84 nt, Homo sapiens
cagcccgggcaccacagaaaaggcccagacaagggcaccaacaacagggaccaaggacggacgaagaaggcgcagagcagagga

SEQ ID NO: 246329 - RNA, 78 nt, Homo sapiens
ccacgcccgggaggggccggggagccgggccccgggggacccgagacaaggcgcagccccagcaaagggcacaagccc

SEQ ID NO: 246330 - RNA, 53 nt, Homo sapiens
gaagccacggcagacacacaacccgacccgacgaggaaagaagaaagcacccc

SEQ ID NO: 246331 - RNA, 72 nt, Homo sapiens
agagcagccgccggggcggagggccggcacgggccggaccacagaaggcccaacaccaaccgccggccgcac

SEQ ID NO: 246332 - RNA, 78 nt, Homo sapiens
gcgccaagacccagagccagaccagcaggaccaaccggaggcccgccaggacaccgcgccgcgggaggaaagcacaga

SEQ ID NO: 246333 - RNA, 84 nt, Homo sapiens
cgcagcgagacccccagcagcagggcaaccccgggggcagcagcaacgccggacgcccacgcaagcagagccggaagagcgcag

SEQ ID NO: 246334 - RNA, 85 nt, Homo sapiens
ggacggccacacagccggcagcccgggcgggcccgggggcgagcagcgcacccgagaggacggggacgggccccaggacgaggaa

SEQ ID NO: 246335 - RNA, 80 nt, Homo sapiens
gagaacccagccggggcccagcccggaaggcaccggagacgcgggcagaaaaaggaaaggaaggcggcgggggagcacga

SEQ ID NO: 246336 - RNA, 54 nt, Homo sapiens
gaagagacccaggccgcgaaaggaggcagggccggcagacagccggaggcagcc

SEQ ID NO: 246337 - RNA, 57 nt, Homo sapiens
accccccaaagccggagcggagaccacggccggccacaaagcgcccggaaggaagcg

SEQ ID NO: 246338 - RNA, 80 nt, Homo sapiens
cggaggaccaggcgcggcgcggcgcggcgaggcgggcaacacaacaaggcgcggacacccagacaagcgcgccaccggcc

SEQ ID NO: 246339 - RNA, 67 nt, Homo sapiens
cagggggcaagaccaaccagccggcacaccaggaaagccacaggacagggagaaaagaagggaaggg

SEQ ID NO: 246340 - RNA, 76 nt, Homo sapiens
gcaggcacgggagccgaaggaggcaagggcgcggcgcccaaagccggagcaagcacaaccgaaacgaccccacggc

SEQ ID NO: 246341 - RNA, 83 nt, Homo sapiens
acgcgggcaccacggcgccggaccacagccggccgcccgccaaagggccgaggaaacagagcaccacggaaggggaaagcccg

SEQ ID NO: 246342 - RNA, 35 nt, Homo sapiens
ccacccgaacacagccccagggccccaaccaagac

SEQ ID NO: 246343 - RNA, 35 nt, Homo sapiens
cacaacacagggaagcggggagcagaaacgggggg

SEQ ID NO: 246344 - RNA, 69 nt, Homo sapiens
aaggaccaagaaccagcacccagcagcgaagagcaaaggacccaccacgagaaacaagaggcagcacag

SEQ ID NO: 246345 - RNA, 85 nt, Homo sapiens
gacggcagagcggccagaacgcccggacagcgacgcacagcgagggagagagagcggagacaaggccacagcaggccacggcggg

SEQ ID NO: 246346 - RNA, 74 nt, Homo sapiens
gggagcgagagcggagaagcgggaggagaccacccaaacgcggcacgggagggacaagagaaaaaaagggcggg

SEQ ID NO: 246347 - RNA, 73 nt, Homo sapiens
acacagacagaggaggccaacagacccccgaaaagcgaagccagcaaagagacgacggccaaacacaacaaca

SEQ ID NO: 246348 - RNA, 73 nt, Homo sapiens
ccaggggccgaggccaagaagaaacgaagagagaagaagaacagggagaaacccgagggacaccagaccacca

SEQ ID NO: 246349 - RNA, 84 nt, Homo sapiens
agaggcgaaaggaagcaagcagcagaagagccaaggaaaaacagcaagaacccaaaaggaccagcgggaacagaagagcaggac

SEQ ID NO: 246350 - RNA, 74 nt, Homo sapiens
ccagaccacagcacagccgggaaggggagccaccagcccccggcaagagggcagaagaaagaaaggaaagagag

SEQ ID NO: 246351 - RNA, 76 nt, Homo sapiens
aggaaaggggagacacacaccccagggagacagagcggacgcagcccacgggggggcgcccgaccggccacagagc

SEQ ID NO: 246352 - RNA, 60 nt, Homo sapiens
cgagacccaggaggaggccacaccccccgggcacaccacagcggacaacaaacggccgca

SEQ ID NO: 246353 - RNA, 87 nt, Homo sapiens
ggaaaacgaaccagagagaaacgcccggccaagaagcacggcacgcagaaaagcgagccaaacagaggaaagagcggagcccgccag

SEQ ID NO: 246354 - RNA, 76 nt, Homo sapiens
aaaaggcgccccgccaggcccccgaggagacggcgacaggagaaggcaaccaaaggcaggacacaaaaacaaccga

SEQ ID NO: 246355 - RNA, 52 nt, Homo sapiens
gcagggcgcccccgggcgggagagagaagaaaaaacaacccagaacggaaac

SEQ ID NO: 246356 - RNA, 59 nt, Homo sapiens
gccaggaagagccgccgaccagggcagccagaggggggagaagcggaggcagacgcgcc

SEQ ID NO: 246357 - RNA, 79 nt, Homo sapiens
gggaggggagcacacagaagggccaaggaaaaacgagcagaaagaagccagggaaaagcacagggccaggaagcagagg

SEQ ID NO: 246358 - RNA, 72 nt, Homo sapiens
gaccaccagagaggaaacccgggaagagggcgagaaggaaagaggccaaagagaaagggggcgggccacagg

SEQ ID NO: 246359 - RNA, 77 nt, Homo sapiens
gcgccaccagcgacgcgggaccccgcacggcacccgccacgcggcggcacccaaccaaggaagggcagcggaacgag

SEQ ID NO: 246360 - RNA, 72 nt, Homo sapiens
gcaacagaacggaaggcacagggagccaagagcagggaacgagaagacccgagaaaaaacgcaccccggcaa

SEQ ID NO: 246361 - RNA, 74 nt, Homo sapiens
cgaagagccaccagacacaggggacccagccgcgaagccggaggccaaggagcggagaggccccccagcgcgcc

SEQ ID NO: 246362 - RNA, 79 nt, Homo sapiens
gagcagaaccagagccacccgggagaggaagagcgaggaggaacgcgcaaggcaaagcaccgagaccggaaggccggcc

SEQ ID NO: 246363 - RNA, 67 nt, Homo sapiens
ccggagcgcccggcaaacaaaccgccacggagggacgggaagagaggagcgcagcagacgagaacca

SEQ ID NO: 246364 - RNA, 78 nt, Homo sapiens
cgagcacaaacggggcggggccggggaacacacagggaacagaaagaacagccaaaagagaaagaccgggcgagccac

SEQ ID NO: 246365 - RNA, 82 nt, Homo sapiens
ggcagaagcagagacaccaggacagaaaagacaggcgccaggagcacagaagagcgaggagccaaagcaacacggcacagaa

SEQ ID NO: 246366 - RNA, 73 nt, Homo sapiens
aggaagagcacgggaaggaacaaaaaagaggagcgagcagagcaagccacaagcacgaaggaaagcccaagag

SEQ ID NO: 246367 - RNA, 65 nt, Homo sapiens
ccgcgccgccaccgcgaacaggagcccgacagaagacgcccccgcaaaacggcccaacacgaagc

SEQ ID NO: 246368 - RNA, 61 nt, Homo sapiens
ggaagagcaagcgggggaccgaacaaggcaaaaggggcagacgggagcgggccgagaaaaa

SEQ ID NO: 246369 - RNA, 79 nt, Homo sapiens
ggaccggccgaacggcgcaggggccgcgcggcaagccacagaaagcccgccccagacagggccccggcccgcccggaag

SEQ ID NO: 246370 - RNA, 85 nt, Homo sapiens
cgcggacaagacccccagcacaacacaccggaaagcccccaggacccaagccaccaggggagggccagggcaggagcccgggggc

SEQ ID NO: 246371 - RNA, 31 nt, Homo sapiens
gaccaagaaccaggaaggccccaagggaggc

SEQ ID NO: 246372 - RNA, 56 nt, Homo sapiens
ggagccgcgacaccaccgacaacacccaagggaaacaccacaaagcgagcaaaccc

SEQ ID NO: 246373 - RNA, 60 nt, Homo sapiens
cacccgggggaggcccagagacggcacgccgcgagggcgaagacaggacggcccaggcag

SEQ ID NO: 246374 - RNA, 74 nt, Homo sapiens
agggacaagcaggaaacaagaaacaccaacacaaaaaaaaccaacagccccccaggcaaggcagcggaaagcac

SEQ ID NO: 246375 - RNA, 88 nt, Homo sapiens
ccccaggcggcaggggcggacccagcagcccccagcccccgaaccacgggcccgggggaacgcaggagcagccagaaggagaaggagg

SEQ ID NO: 246376 - RNA, 84 nt, Homo sapiens
cgcggcgcagaagaaacccgcggcgaccacagccaaagcgggcgcgggacaagggcgcaccggggcgcagcgagggaggacaac

SEQ ID NO: 246377 - RNA, 82 nt, Homo sapiens
ccggcggaccagaaagaggagccgcccagacaggaagaggcgagcaggggccaccacgagcagcggcaagacggggcaccgg

SEQ ID NO: 246378 - RNA, 62 nt, Homo sapiens
ggaggggaggccagcaaccagggaacaggaaccagagggcacagccaaggccggggaggaca

SEQ ID NO: 246379 - RNA, 112 nt, Homo sapiens
agggacccaggagacacagagaaacaaggacccgaggcggggcccacagaccccaagaagaagcggaagaggagccgcggaaccaagacacaaggaacagaagacaggacca

SEQ ID NO: 246380 - RNA, 82 nt, Homo sapiens
gcagagccggccaagaagacgccccacggccccggaacagcaggcgcgcacgcggggacacgacaccaaaaaagaagacggg

SEQ ID NO: 246381 - RNA, 52 nt, Homo sapiens
ggaccagcacacaagccaaccaaaggcgaaacagaaagcaggcaggggaggg

SEQ ID NO: 246382 - RNA, 50 nt, Homo sapiens
cccgggccagggaaggaaaaaggacggaagcggaacaaaaccaaagcagg

SEQ ID NO: 246383 - RNA, 71 nt, Homo sapiens
cacggacgaaacgggacaccgagcccccccggcagcccagacgacagagcaaccccagaaacccacaagag

SEQ ID NO: 246384 - RNA, 76 nt, Homo sapiens
cgccgacgcagccaaaggagaagccccagcccagcagagcaaaggcccgagaagcgggcccaccaccaagccagcc

SEQ ID NO: 246385 - RNA, 87 nt, Homo sapiens
ccccagcgcccgggcccgaggaggcagccaagccaggccgccacgcggcgagcgacaggacccaaacccgggccgcccggagcgcca

SEQ ID NO: 246386 - RNA, 54 nt, Homo sapiens
gacaggagggaaggcccaagaacaccgaccgaggacaacaggagagaagcaaac

SEQ ID NO: 246387 - RNA, 79 nt, Homo sapiens
gggaacccacgagggcagccggcgggaggaacgccacgcagcgccggaaacgccacgggaaccagaagaggccaaccag

SEQ ID NO: 246388 - RNA, 39 nt, Homo sapiens
caaaagcaccaccaagaccgagaaggacaccgcgcgacc

SEQ ID NO: 246389 - RNA, 78 nt, Homo sapiens
cccgcccccgcagcagcgccaggaacgggaagggcacaggaagaaaggaccaaggaaacaggaacccgcaaccacacc

SEQ ID NO: 246390 - RNA, 83 nt, Homo sapiens
ccccgcagcgaccggaagacgaggcggcgggggacaagcggcgccccagagcggacgaggccggggggggcacagagccccgg

SEQ ID NO: 246391 - RNA, 78 nt, Homo sapiens
caagaggaggacagcgcacacagcaagcacgaggccccacagagccacgagagaaccaaggacgaaaggcgaagccaa

SEQ ID NO: 246392 - RNA, 36 nt, Homo sapiens
agcgcgagccgggaaggggagaaccgccagcgacgg

SEQ ID NO: 246393 - RNA, 76 nt, Homo sapiens
caggaggacgccaccaaaagcacgaggcagcaaagagagcaaaagcaccagaaaccagagaaccaaccacgcagca

SEQ ID NO: 246394 - RNA, 50 nt, Homo sapiens
cagcccgcgggcgggaccgggccccggcgcccaagagagaggggcgccag

SEQ ID NO: 246395 - RNA, 68 nt, Homo sapiens
gagagccgaaaggagaagagagaaaggacacgggggggaaacaagcacgggcgagccaggacacgacc

SEQ ID NO: 246396 - RNA, 83 nt, Homo sapiens
gcagcgcggacccgcccggagagaggggaggggcgaccccggggcccggccagcacgaccgaggaggggcggacagcggagga

SEQ ID NO: 246397 - RNA, 72 nt, Homo sapiens
cggcggaaaggaaagcccgacagaagcaccgagacccaagaaagagccgagagcgccggaggaccacacccg

SEQ ID NO: 246398 - RNA, 49 nt, Homo sapiens
gggcaaggacacggggaaaagacagacagggccccccggcccccggccc

SEQ ID NO: 246399 - RNA, 70 nt, Homo sapiens
gcgacggaaaggcacgaaagccagcaaagccagggggagaaccagacccaacggaaggaagaggggaggc

SEQ ID NO: 246400 - RNA, 73 nt, Homo sapiens
caagggacacaacgcgccacgaaggccaggccagggagggacaccgaaaagcaaagggagaggacacacgagg

SEQ ID NO: 246401 - RNA, 64 nt, Homo sapiens
gccaaaccagaccccaggccgccagcccagcgaggagagaaggcgaggaagcccaagcacaaag

SEQ ID NO: 246402 - RNA, 70 nt, Homo sapiens
aaagcgaggcgaagagggcaagacggagagaaacagcaaagcagaaacaagcaggagaagacagggcaac

SEQ ID NO: 246403 - RNA, 82 nt, Homo sapiens
cagacgcagggcgcccccgaagcgacccccgaagggacccgccacgaaggggagccccggagaaccgagacaccaagaacac

SEQ ID NO: 246404 - RNA, 58 nt, Homo sapiens
agcccagcgggccggacggggcggggggaacggcaaagaacggccaaggaaggagcga

SEQ ID NO: 246405 - RNA, 89 nt, Homo sapiens
ggcccgcaggcgcagggcggccgcagcgggccgcggccgaggaggcagcgcgaccccgcacgaaacaaaggaggagaggcccaagacca

SEQ ID NO: 246406 - RNA, 77 nt, Homo sapiens
cgcgaacaaggcaaacagacggcaggaggggaacacgggcggcgagagaaaaggccagcaccaagacgaaaccggca

SEQ ID NO: 246407 - RNA, 74 nt, Homo sapiens
ccaacggggcggccgcgacccccggcaacccggagaaggcacagagcggccgcgccagcgaacaccgaaaacga

SEQ ID NO: 246408 - RNA, 80 nt, Homo sapiens
agggaaggaggccgagccgggaccaggcccgggggcggcggccacgccaaggacggcaccggaagaagcgaccacgaacc

SEQ ID NO: 246409 - RNA, 62 nt, Homo sapiens
cacccccagcaccaccccagccccgcgcccgagcaacagcccgaggggaaaaaagcgaaagg

SEQ ID NO: 246410 - RNA, 81 nt, Homo sapiens
gccagacgcagagacaaaacaagcccccaggaaccacgacccaaagacaggaccacgcaccagcagagaaggaaagcaaac

SEQ ID NO: 246411 - RNA, 61 nt, Homo sapiens
gcacgccagggaaggagacaagcaacaggcccggcgccacgcagagccccgccaggaagac

SEQ ID NO: 246412 - RNA, 76 nt, Homo sapiens
caagacccacccccacgagacaccacagacccccggccccagcaccaacagcccggggaggccacagcccggaaga

SEQ ID NO: 246413 - RNA, 57 nt, Homo sapiens
cccggacggcccaccgacacgcaaaggcggcaccaggacgccgaaaagcgaccggac

SEQ ID NO: 246414 - RNA, 71 nt, Homo sapiens
cgagcaacgagggcaggaggaccgggggaaagcaaaaaaaccaccccaaggagcagacaggaggcaggaca

SEQ ID NO: 246415 - RNA, 79 nt, Homo sapiens
aagaaaaagcacaagagcaccaacgagggagaccaagacacaccaccccagggggggcccaaccaccaggacgaacaga

SEQ ID NO: 246416 - RNA, 63 nt, Homo sapiens
accaagaaccgaggaggcgcagccagccagggcaggaggacgcggcggcggcgaggagacccc

SEQ ID NO: 246417 - RNA, 41 nt, Homo sapiens
acggcccggaaacaggaggacgccggcccggccacccccgg

SEQ ID NO: 246418 - RNA, 84 nt, Homo sapiens
gcgcggccgagaccggccgcagcgccgccgccgccgccagggggagaggcaccagcaacagaccaaccgcagcaagcacagaga

SEQ ID NO: 246419 - RNA, 85 nt, Homo sapiens
ggaggagaagccggaggaggacaacgacaccaccgcagcgacgagcagagaaggagggggcagagcacggcaggcagaaggggcc

SEQ ID NO: 246420 - RNA, 65 nt, Homo sapiens
gaggcgagaaggaggggcgagaagcaaacccaagacggaaaaggggggaaagaaagaagcacagg

SEQ ID NO: 246421 - RNA, 74 nt, Homo sapiens
ggaaaaggcgggcacaggccgaccgcgcggggcccgccaacggggaacacgccacccagcaccacgccaagcca

SEQ ID NO: 246422 - RNA, 78 nt, Homo sapiens
cagaaccgggagcgacgagcgagccagccagcgggaacaagagaacaaagcccgggagaagacaccgaagggaagccc

SEQ ID NO: 246423 - RNA, 73 nt, Homo sapiens
cgcgaggagccaggaggccggccacgcggcaccggcccaggggccggcgaaacagaggggggccaggaggagc

SEQ ID NO: 246424 - RNA, 82 nt, Homo sapiens
gggaaaagcaccacggagggacgcagaaaccgagccgaggaaggaaaaaaagcggggaaggggggcaaaaaaaagaagcaag

SEQ ID NO: 246425 - RNA, 76 nt, Homo sapiens
gcaccagaggccaggaaagcgccggcccacgggcacagcccaccaaagccccccagcgggcggccggggccaggag

SEQ ID NO: 246426 - RNA, 77 nt, Homo sapiens
gcacagaacaacagcacgggagaaagcgcccacgcacgaaagcccaggccaaaaagaggcaagagaagcacgaccca

SEQ ID NO: 246427 - RNA, 76 nt, Homo sapiens
acgggcggcagcccgagaccgcagcaggccacggggcgccggccacgaggggcggaagaccaggcaggacagccac

SEQ ID NO: 246428 - RNA, 96 nt, Homo sapiens
cggacgacagaacccggccgacccggaccaacaaccccaaggccgaaacacaagcaaggaacacaaagaagaaagaaaggaacggaaggaagaaaa

SEQ ID NO: 246429 - RNA, 82 nt, Homo sapiens
ccccagccccgcaggcccaaccgccgccagcaccaggccagcaccaccgggagcgcccagccgccccccgcgcgccgcagaa

SEQ ID NO: 246430 - RNA, 82 nt, Homo sapiens
agcagagacagacacaagcgggccaacaaaaggagcagcgggaccccacgggcagagaggcggagcggagaggacgagccaa

SEQ ID NO: 246431 - RNA, 118 nt, Homo sapiens
gccgggacccgaaaccccgaccgcagccaggccgacccgaccggaccagacaagccagagcaaacacaggggaagacccacacaagcaagcaacaggccccacgcagaccgaaaaacg

SEQ ID NO: 246432 - RNA, 79 nt, Homo sapiens
aaggaggagcggaagaaccagccgacaaaagaagacagcaaacaaagcgccaagaaagaggcccacccagacaggagcc

SEQ ID NO: 246433 - RNA, 74 nt, Homo sapiens
cacccccaccggccaggcgagaaaggcaggaccaggagcgcaacacagacaaacgaagaaccccaaacgcagcg

SEQ ID NO: 246434 - RNA, 60 nt, Homo sapiens
gagaagacaccaaaaagcaaacggaccagaccgaccaccaaaaagaagacaggcacaaaa

SEQ ID NO: 246435 - RNA, 76 nt, Homo sapiens
aaaagacaaggaagagagcgcccaggaaggagccaaagcacaagaagaagacgaggcgaagaacggcccaacaaca

SEQ ID NO: 246436 - RNA, 81 nt, Homo sapiens
ccggacccggcgaggacacccagaacccccaaaggccacccaacacagcgccacggcaggggcagcagaagaccaaagcag

SEQ ID NO: 246437 - RNA, 74 nt, Homo sapiens
ggaaagggacccgaaccgccccagcacggcgaggccccaaggaacgcacagacagcgggacacgcacaccacgc

SEQ ID NO: 246438 - RNA, 81 nt, Homo sapiens
gcgccggcgcggcgcgcgcgggccggcgccggccgcgcgggcacgcgccgcgcggagaaggaagcgccggccaaacgagca

SEQ ID NO: 246439 - RNA, 67 nt, Homo sapiens
gccccagaaaacgggaacggccagaccacggaccaaagcagaaccacaagccaaacagcagccaaac

SEQ ID NO: 246440 - RNA, 70 nt, Homo sapiens
gggcgaggaagggcagagaagggaggaaaacaagcaggcagcgcggccgggagcaggagccagaacgaga

SEQ ID NO: 246441 - RNA, 70 nt, Homo sapiens
aaaggcccaacacacagcggaaaagaaaggccggcaacaagaccgaggcacggagaaagaaccaacaaaa

SEQ ID NO: 246442 - RNA, 67 nt, Homo sapiens
gcggggggccacgcgacaaggaagaaggccccagacgaaggagcggacggaaaggcggagacccaaa

SEQ ID NO: 246443 - RNA, 69 nt, Homo sapiens
ccccggcccacaggggggggcaaacccgagagaacggggcggcgacggcggcgcgaggaccgaccgggc

SEQ ID NO: 246444 - RNA, 71 nt, Homo sapiens
ggcccggagaaccaagaacccaccacccagcagcagggcacaagaggccaaagggcagaacggaaaaaagc

SEQ ID NO: 246445 - RNA, 75 nt, Homo sapiens
acggggggaggacccgaccaggagacccccccgagggacggcaggcgaaagcgcgagcgaagcgcgcagaaaacc

SEQ ID NO: 246446 - RNA, 79 nt, Homo sapiens
agagaaaagccgaggaaaagagaaagacagcaacaacaaccagcagcaacaaggaaacagagaccagaccggaagaagc

SEQ ID NO: 246447 - RNA, 56 nt, Homo sapiens
gcggagcgacggggaggcgcggccaacggggccacaagggaaccgggaaaagcccc

SEQ ID NO: 246448 - RNA, 86 nt, Homo sapiens
gcggcgcgagccagcggggccgccgaaagacccgaaaccccagggagacgggagcaggagacgagacccacggccagccgaaagca

SEQ ID NO: 246449 - RNA, 75 nt, Homo sapiens
gcggggccggaaggagcggcgggggaaacaggaagagaacagaacggaagaaagcagaagaggacgaagcgcaac

SEQ ID NO: 246450 - RNA, 77 nt, Homo sapiens
ggccgggaggccgccgccagagagagccggagggcaggaagccgccaccaggaaccccaaagaaggagagacaagac

SEQ ID NO: 246451 - RNA, 81 nt, Homo sapiens
ggacgagacgccgggaccgagggccggggacaaggccgccgaggaacaggagcgaccagaaagaaacacggcgcaaacggc

SEQ ID NO: 246452 - RNA, 60 nt, Homo sapiens
caagagaagacccagaggaagccaaaaggaagaaagaagcgaaagagagaagagcaagag

SEQ ID NO: 246453 - RNA, 84 nt, Homo sapiens
gcgccgggcaccgaggaccagccaagacagggcaccgccgaccgaaaccgcaaacacacgacagaggcaaggcaaacacgaaga

SEQ ID NO: 246454 - RNA, 80 nt, Homo sapiens
agccgagccggggaccggcccgcaggcggggagcgccggacacgcgggacgcgcgggggcaggacaaccaccaccagcga

SEQ ID NO: 246455 - RNA, 67 nt, Homo sapiens
ggcgcagcgcccgccgcggcccgggcccccccgccggaaacaggcgcggggaggcccagcccgccgc

SEQ ID NO: 246456 - RNA, 72 nt, Homo sapiens
aagccagacagacgagaggcggacaggacagggaccacgggacacgaaccggaacccacagcacacggggaa

SEQ ID NO: 246457 - RNA, 75 nt, Homo sapiens
cccaggacagacagccccaggaggccagggcaggggcccggaggacggcggggcgggcccgacccccgccgcccc

SEQ ID NO: 246458 - RNA, 77 nt, Homo sapiens
ggccacagagacaagagagagacacacagcgaagacgacaacaacccggccaagggcccgggacaccgggaacggcc

SEQ ID NO: 246459 - RNA, 41 nt, Homo sapiens
agaacaccagcacggcgaagaaaaagcggggaaggggggca

SEQ ID NO: 246460 - RNA, 73 nt, Homo sapiens
cccaaaagagggacacaaacaacggcccacagaaaagacgaccaccagacccacaaccgcccgagacccgaga

SEQ ID NO: 246461 - RNA, 80 nt, Homo sapiens
ccgcgcgacgccgagcgcgccgcgagaccccgccccccaggaagaaggagaaagacaaagccccgagaaagaccagcacc

SEQ ID NO: 246462 - RNA, 75 nt, Homo sapiens
gggacgagggccgcaagagggaggagggcagggagggccagcgccggggggcggacacgggcgaagcgggagcgg

SEQ ID NO: 246463 - RNA, 77 nt, Homo sapiens
acagagaagaaaaaaaaagaggcggcagaagaggcggccacccacgagccgacggcaaacgccagggagccaccaag

SEQ ID NO: 246464 - RNA, 72 nt, Homo sapiens
aaacaggcccccagaagagcggagagacgaaagagagccgcgagaaccgaagcccacaagaccagccgccac

SEQ ID NO: 246465 - RNA, 84 nt, Homo sapiens
cagcaggccagccgagaggacaggggagagacggaaggggcgacaagcggaggagaaagccgccagaagcagaggccagggccc

SEQ ID NO: 246466 - RNA, 80 nt, Homo sapiens
aaaaccaagaagaaccaccaaagaccacgaagccggaagcagaggggaagaacaggcagcacaggcaccccacgagagaa

SEQ ID NO: 246467 - RNA, 57 nt, Homo sapiens
cacgcccagacgcgggcgcggaaaccgccgcggagccaaccagccggaagaacaccg

SEQ ID NO: 246468 - RNA, 72 nt, Homo sapiens
gaaaacgcgcgagaaagaccacaggccagaagaaagaggcaggcacgcggaaagcgaaaaccaaagcggcgg

SEQ ID NO: 246469 - RNA, 85 nt, Homo sapiens
gcccagccaagccccgccgacgcgggcaccggagccagccccgcagcgggaagccagcagagcagggaggaaaaccaaggcaacg

SEQ ID NO: 246470 - RNA, 79 nt, Homo sapiens
ggcaaggcggcggacggcgcgcgcccgaggcgaggaggagcgcggcgaggccaacggcgggaggcggggaccagaagac

SEQ ID NO: 246471 - RNA, 73 nt, Homo sapiens
gcccagaaggcgagaccagagacgagaaggaacaggaggcccggacccccagcacaagcgcaggccaggggga

SEQ ID NO: 246472 - RNA, 74 nt, Homo sapiens
gcgggcgggggcaaacaaaggcggccacgcgcggcgccgccggacaagggagagacagagcgacagagagaaaa

SEQ ID NO: 246473 - RNA, 67 nt, Homo sapiens
cagaaccacagcacacagagcaacaggggagcagagaaacagcggacaggagggccacagcaccccg

SEQ ID NO: 246474 - RNA, 76 nt, Homo sapiens
cggagaccgggaccgcgagaccccccggagcggaagacgccacaaccgaggaccccagaaccgcacaagagcccag

SEQ ID NO: 246475 - RNA, 72 nt, Homo sapiens
cagaggcagcaaagagacgcagaggcgaaggcccagagcgcggcccaggggccaacggacagaggcccagag

SEQ ID NO: 246476 - RNA, 77 nt, Homo sapiens
aaaccccacaacagacagcggaccagcgaaaaaagggacaacagagccaagaaggagccagccaggccagcccagcc

SEQ ID NO: 246477 - RNA, 115 nt, Homo sapiens
gcgccgcggggaccagcgcggacggcggcgacggaggagagcagccccacgcaagcacgagcgcggacgagaacaggaacaacccagacacccgggccagcacaaacccagaaac

SEQ ID NO: 246478 - RNA, 74 nt, Homo sapiens
acagccccgcccgacacagggaacagcaggccccggggcgcgcacagacacagggagaccgcgcgccggccaca

SEQ ID NO: 246479 - RNA, 78 nt, Homo sapiens
gacggcgccaacaggagaaagggaagaggacgagacagaccaagggcccgaggcgcggggcacgccgcccggccccca

SEQ ID NO: 246480 - RNA, 80 nt, Homo sapiens
cgaggcccagaacagggagaacgcagacagaaaccaagccgccccgaacaacgccgaggggggcagacaccaacccaacg

SEQ ID NO: 246481 - RNA, 60 nt, Homo sapiens
aacccaacgcagaaggaacaagaaaagaaggagggcagcagcccggaagaaccagcaagg

SEQ ID NO: 246482 - RNA, 74 nt, Homo sapiens
gcaggcagggagaaggaaggcaggcagcaggcagggcacgcaaaaaaaccaagggaaaagagacaagaccgaga

SEQ ID NO: 246483 - RNA, 82 nt, Homo sapiens
cgcgccggcgcgcgggcgggccccagggggcagaaggcagcccgcgacgccacggagacagaacacagacgccgacggggag

SEQ ID NO: 246484 - RNA, 63 nt, Homo sapiens
gaaaacccagaaggcgcgacccccgcgaagacccccacgcacggacccggggcgacccgaaaa

SEQ ID NO: 246485 - RNA, 69 nt, Homo sapiens
cacagggcgcgcaggaaaaagaagaaaagaaaggaaccgaaagacccaccagagagagacagggaccag

SEQ ID NO: 246486 - RNA, 78 nt, Homo sapiens
gcgggcagcaggaaaggggccaaggaaaaagaacagaggccaacccgacaagaggaccaaggccaccagagaaggaag

SEQ ID NO: 246487 - RNA, 78 nt, Homo sapiens
cgggaacgagaggagcaggcgaacccacgccagaggcgagccaaaggaggcgagagcagagcaacggcagaacaagaa

SEQ ID NO: 246488 - RNA, 78 nt, Homo sapiens
gaaaacggacgagaacaagcggaaaacaggggcgaggggacaaggagaagaaagaggcgaggagaaaaacaccgacag

SEQ ID NO: 246489 - RNA, 62 nt, Homo sapiens
acaacggcagaccgcagaacacccagccagggcaccgaggaggagcccagcccaaccacacg

SEQ ID NO: 246490 - RNA, 82 nt, Homo sapiens
acgcaggaaccggcccacagcgagaggcccggccagagaccgccgggggagcaaggcgaccgggcgcgcccgaaggggccgc

SEQ ID NO: 246491 - RNA, 69 nt, Homo sapiens
acgcagggcgcccccgaaccgcgggacacagaacaccccaggccgcccgcagggaccacacccccagga

SEQ ID NO: 246492 - RNA, 68 nt, Homo sapiens
agcacgcgacacaaaacgcggacccccgagaaccgcgccaccagagacgagcgcagggcaccggcaca

SEQ ID NO: 246493 - RNA, 77 nt, Homo sapiens
gcggcgacggccgcggccgcccgaagaaccccgagacgaggacgacgcagcacagagaggaaacgaggaaacgacca

SEQ ID NO: 246494 - RNA, 84 nt, Homo sapiens
ccgggaggcgacgcacacgagcggaggcgaagagcagacagacagcgaacacggaagccacgaaaagcaaaagcacaggaagcc

SEQ ID NO: 246495 - RNA, 80 nt, Homo sapiens
accgaagcagccaccacacagcagacaaagaccaacccagaggagcaggaagggcgggcgagggcgcgcacagcgagcgg

SEQ ID NO: 246496 - RNA, 79 nt, Homo sapiens
aacaaaagcagaacaccccagacaaaggcaaggacaagccacagcagccgaagagagaggaagaggaagggagggaaaa

SEQ ID NO: 246497 - RNA, 81 nt, Homo sapiens
cacacacaacgaaaacaggggccaaagggagagggaagccacaacaagccaaagaagaaggggagcgacagaacaagaaag

SEQ ID NO: 246498 - RNA, 70 nt, Homo sapiens
cgaaccacacgccaaaaggagcaccgagggaccccaaccccagaccgaggaacaggccaccccgacagca

SEQ ID NO: 246499 - RNA, 56 nt, Homo sapiens
gagaaagggagccgagcgagaccacgcaccacgggcgaaccgcaggaggcacaccc

SEQ ID NO: 246500 - RNA, 109 nt, Homo sapiens
caaacgaaacaaaaagggggagacagaccgcagacaggaacacgcgccagccccccagacggacaaccgcacacagacagagccggcacaacccaggcgaggaagggga

SEQ ID NO: 246501 - RNA, 78 nt, Homo sapiens
aaaggaagggaggaacaagcagacggaggaaggaccaccccggcaaagcgggaggggccggacacccaacagcacgca

SEQ ID NO: 246502 - RNA, 75 nt, Homo sapiens
gaaccaccggcagaaaagagacggacgcggagaaggacagaaaccgaagggagaagagccacaaccaggagaacc

SEQ ID NO: 246503 - RNA, 68 nt, Homo sapiens
aaccccagaccggagccagacagcagccaagggccgcgagggcccggaacaggggcacgcacgaggcg

SEQ ID NO: 246504 - RNA, 73 nt, Homo sapiens
gggaagaagacggcgaagcaccaacgccaagcaagccaaagaaagcagcggagccgcaggggaagaacccacc

SEQ ID NO: 246505 - RNA, 89 nt, Homo sapiens
gcgggaggccggggaagcggcgccgaaggccggcccaccgcaccgagaaggccaccgagggagccaacgacaaaacaggagccagcacc

SEQ ID NO: 246506 - RNA, 55 nt, Homo sapiens
cggcccccacccaaggagaggccaagcccccgcaaccagcgacaaacccgaaggc

SEQ ID NO: 246507 - RNA, 54 nt, Homo sapiens
acgcccgcccgaggcgacggccgcggcgcacaggaaacacccaaggaaccaaag

SEQ ID NO: 246508 - RNA, 37 nt, Homo sapiens
accgcccaccaccgaagggagagaacagcacacagag

SEQ ID NO: 246509 - RNA, 72 nt, Homo sapiens
ggcgccggagcgcgaaaaacagagcggggaaagaccaacaaagcaccgagaaagccaaaagaagaaaaggcc

SEQ ID NO: 246510 - RNA, 71 nt, Homo sapiens
aacagggccgaagaggaagacgccgcgcaaaggcacacggaaggccgccgccggccgcgaacacccgacca

SEQ ID NO: 246511 - RNA, 54 nt, Homo sapiens
gagggcggccaaccgcacagacgaccaggggcggaggaaggcaagagggcaggc

SEQ ID NO: 246512 - RNA, 77 nt, Homo sapiens
cggccaaggaaagccaggaagcggaagaagaggaaggcacgaagaaggggaacaggaacacaaaggcaagggaaggg

SEQ ID NO: 246513 - RNA, 81 nt, Homo sapiens
ggagacagacgacgcgagcagccaagggggagcagccacagggcagaccccggccaaagaggagcccaagcccccccagag

SEQ ID NO: 246514 - RNA, 71 nt, Homo sapiens
caccccagagaccaggcgccacagccggaagcgggagaagcaagacgaagaacagaggcaaaggaacagag

SEQ ID NO: 246515 - RNA, 84 nt, Homo sapiens
cggccggcggaggaccccccaaccgcggaggggaccacgggagaggaggaagagacccacagaagaagcagagcggaggggagg

SEQ ID NO: 246516 - RNA, 71 nt, Homo sapiens
gaaccggagagacacacagcagcccagccagcccgagcaagaaagaggccaaaggccggaagaggcgcaca

SEQ ID NO: 246517 - RNA, 61 nt, Homo sapiens
gagaccaccaccaccggccccagcccacccaccccagggagcgagggcacacgagaaacag

SEQ ID NO: 246518 - RNA, 76 nt, Homo sapiens
ggccacaccagccgggccaggcagagcgccgggagcgccgccaggacaggcccgacgacccagaccaagagcaccg

SEQ ID NO: 246519 - RNA, 57 nt, Homo sapiens
aacgagcccccagcagccacccggccgagacgaggacgcgcacaggaaaggacgcgg

SEQ ID NO: 246520 - RNA, 76 nt, Homo sapiens
gacgccccgcacaccggagcgcccagcgcgaggagaaaagccccaacacccccaaccaccgggcagccaagcaggg

SEQ ID NO: 246521 - RNA, 69 nt, Homo sapiens
acgccaaaagaacagagaaggacaaggacaggagcgggacgaagcacaggaggacagcagccgacagac

SEQ ID NO: 246522 - RNA, 67 nt, Homo sapiens
caggacaggccccagacgggaggaacaacccacaggagggccagaggacaaagcacggcggaagaga

SEQ ID NO: 246523 - RNA, 73 nt, Homo sapiens
aagaggaggagggagcgagcccgccaacaacacccccaagccacgcggagggaggcgcccggccaccccaagc

SEQ ID NO: 246524 - RNA, 48 nt, Homo sapiens
cccgcaccggagcaaagcaaagaaacgggaccaccaggaggccccagg

SEQ ID NO: 246525 - RNA, 70 nt, Homo sapiens
gaacaaaccgccccaggggagccgaccaggcggacccccacagaagcagagggacagaagaagaagcgac

SEQ ID NO: 246526 - RNA, 40 nt, Homo sapiens
ggcacccgagaaaggggacggcacccccagcaggacagca

SEQ ID NO: 246527 - RNA, 84 nt, Homo sapiens
cacggcagcggcccaacgccaagaacaacgaaagaccacagcaagaccacgcccccagccgggggaccaggccgaacgacccgg

SEQ ID NO: 246528 - RNA, 58 nt, Homo sapiens
gagaaacggagaccggaaggagaggacagggcagaccgccagcagcacagcaagccac

SEQ ID NO: 246529 - RNA, 74 nt, Homo sapiens
agaagaaaagagggaaagggcacagacgggccccacaggcgacaaagagcgaaagggcccaaggaacagaccaa

SEQ ID NO: 246530 - RNA, 79 nt, Homo sapiens
agcggcgagacaggaagcagagggcagggggcaaacaagccgaccggaaaaaggcgggcaaaacgccgagcccgagaac

SEQ ID NO: 246531 - RNA, 78 nt, Homo sapiens
gcccggccgagggcggccggacccccccccggcgcccaagcggaagggcgccagaaaccccgaaaggaagaggacccc

SEQ ID NO: 246532 - RNA, 53 nt, Homo sapiens
gcagcaaaccacaggagaggaggacgacaccccgacgacggagcaagcggggc

SEQ ID NO: 246533 - RNA, 70 nt, Homo sapiens
agcgaaacaccaagagggaaccaacgcagagccccagaacaaaagaacacagaggaaccagaacagaccg

SEQ ID NO: 246534 - RNA, 78 nt, Homo sapiens
cccgcccggagcgagggggcgcccgccacgacagaccgacacgacgcagcacagcggccgaaccccaggaccagcccc

SEQ ID NO: 246535 - RNA, 80 nt, Homo sapiens
gcgggaaaggacgcaaggagggcaacaccacagcacaccaacgccagccagaccacccgggacggaggcaaggacggggg

SEQ ID NO: 246536 - RNA, 79 nt, Homo sapiens
gggcaccgccacacccacgccgacccggaggagacagcaaggaagaagaaaagagagccaaggcggcaaaacccaaaac

SEQ ID NO: 246537 - RNA, 86 nt, Homo sapiens
aaaacagggccggccgcagagcccaccggaaggagaaggaagaggagcggacaaccaaacccaccacaagaggaaaaaagaggccc

SEQ ID NO: 246538 - RNA, 73 nt, Homo sapiens
ggaggcgcccggagcggccgccccagcgacccaaggccagccagccccaggcaccagcggacaggacagggag

SEQ ID NO: 246539 - RNA, 71 nt, Homo sapiens
cgaagcgagcgccgagagcaacagacccaccgcgcacgagaaagagaagagcacagcgaccaccggaggaa

SEQ ID NO: 246540 - RNA, 59 nt, Homo sapiens
aagaagggccaccccacagacgcgagccacccaggacgaggccaggccgaaacgcaccg

SEQ ID NO: 246541 - RNA, 78 nt, Homo sapiens
cacgagccagaagaaaacgaaaagcaagaacaggaaaaagcacagcgaggagagaacagcacacagaggcgcaagggg

SEQ ID NO: 246542 - RNA, 55 nt, Homo sapiens
aaggcgacgccagaggaggaaaggaagacaaggaacccgcgggcggccacggccc

SEQ ID NO: 246543 - RNA, 69 nt, Homo sapiens
caaggagaaagacacagccaaaggagaacggccgccccacgaacgggcaacaggaaaacaacccagaga

SEQ ID NO: 246544 - RNA, 73 nt, Homo sapiens
agaaaaccaaaacgcaacagaaacaacaggccacacacccccacggcgagacccagagagccaagaggggcag

SEQ ID NO: 246545 - RNA, 87 nt, Homo sapiens
ggaagaagcaaacgaagggcaagaacaaaaacaaagcagacaaaggagagacagcacaaccaggggcgcaacccagcaagagaagga

SEQ ID NO: 246546 - RNA, 83 nt, Homo sapiens
agacagcgcaagcaccaggacgcgaagccgccaacaccacaacccccgagaccagcgggaccaggagcggcggacggcgggag

SEQ ID NO: 246547 - RNA, 84 nt, Homo sapiens
aacggcgacccaagaagcagcccacgaaaggcagccgcggacgccgcgccagcgacaaacaacgcggccgccggagccgccgcg

SEQ ID NO: 246548 - RNA, 78 nt, Homo sapiens
agaccaagcgcacaggaaaccaaaggacgcagacacaccaaggaaagcaagaagccggacagggagcaagccaaagga

SEQ ID NO: 246549 - RNA, 78 nt, Homo sapiens
cagaagccgcccgacccaagcacgcgccacgcacacacagccggcgagccgccggccagaaccggggcccgcagccgc

SEQ ID NO: 246550 - RNA, 84 nt, Homo sapiens
caccaacgcggccgacaacagccggcgccgccacggccagcaagggcccgcaagccaccggggaccgacccaccccgcacccaa

SEQ ID NO: 246551 - RNA, 85 nt, Homo sapiens
cgaggagccgcaccaaggcccggcgccacgaaagccggccacgccgggccggagccggaaaaggcgacggcggagacagaagaga

SEQ ID NO: 246552 - RNA, 101 nt, Homo sapiens
ggggagcccgacccccgcagagccaacccccgccagacacggcccccgaacgcaaggagcgcgcaaacccggaccggcggggggaaaaaaggagccgcccc

SEQ ID NO: 246553 - RNA, 64 nt, Homo sapiens
ggccaggagggacaggaccggaggcgccagccaaccgcaaacaagcagcaaggaccagcacggg

SEQ ID NO: 246554 - RNA, 80 nt, Homo sapiens
agcgggggcgggcgcacccccagaaccagacaaagcagaggaacgcccacgagaagaacaagagaagaaacccaccgcac

SEQ ID NO: 246555 - RNA, 38 nt, Homo sapiens
gcggcagcagaaagagcaggaaaccagacgaaacaaca

SEQ ID NO: 246556 - RNA, 40 nt, Homo sapiens
ggcagaaacagagaaggaacagcaggcaggaaccagcaac

SEQ ID NO: 246557 - RNA, 34 nt, Homo sapiens
ggagcgcaagggcggacagcggcaaccgggaaac

SEQ ID NO: 246558 - RNA, 73 nt, Homo sapiens
aaagaggcagagacccacgcgggacaacacaagggaaccaaggagggcgccgcgggcgcgccgccggcgccgc

SEQ ID NO: 246559 - RNA, 82 nt, Homo sapiens
ggggcccggagcaggcccacgagccgcagcgagcacaggcggggcaggaaaaaggagagggcacagaacgaacagagcagcg

SEQ ID NO: 246560 - RNA, 53 nt, Homo sapiens
gccggacagccggcgggaacaagacagggagccacaacaaggacacgacaaaa

SEQ ID NO: 246561 - RNA, 37 nt, Homo sapiens
cacacacgaggagcccagggcagaaaggaacaggaag

SEQ ID NO: 246562 - RNA, 73 nt, Homo sapiens
cagggaagaaggcgaggcaccggaacagacgcaggaaggcccgccagcaagaggaaaagcagagacacccggc

SEQ ID NO: 246563 - RNA, 68 nt, Homo sapiens
agcgacgcagaagacggggacgcaccacgagccacaaggcgcaagcagggccacacaggaaacagcag

SEQ ID NO: 246564 - RNA, 85 nt, Homo sapiens
gcacaaaggcggacacgaaaccaccgggaagcgccggggaacgcaggaagggaaaaggccgaggcacagcgggaagaccgcaaag

SEQ ID NO: 246565 - RNA, 80 nt, Homo sapiens
ggagggcgccgagaggccgggggcgcgggcggcgagagccaccaaagaacaacaagagccgcagaaggcagcagggaacg

SEQ ID NO: 246566 - RNA, 74 nt, Homo sapiens
ccaagaacagagcggggggcgccaccccggagggcagaggcagccaccaccacccgggagagccaaagcgccca

SEQ ID NO: 246567 - RNA, 96 nt, Homo sapiens
ggcgcacgcaccacgacggcgccacaccgagcgcgaggcgcggagagcaacgccgggacagcgcaaggcccccccagcgccgccgcccagccagcc

SEQ ID NO: 246568 - RNA, 36 nt, Homo sapiens
ggcggaccaccacacagggaacccacaagaagacag

SEQ ID NO: 246569 - RNA, 54 nt, Homo sapiens
agacagcgccagcacgccgacagacagaaagcgcccaggacaggaccaggaggg

SEQ ID NO: 246570 - RNA, 97 nt, Homo sapiens
ccgccggcgcgggaaacgggcgaagcgacgagccgcgaggagacagaaggacagagaagaacccagaaaaaagcaaggccgaaaaacgagagaggag

SEQ ID NO: 246571 - RNA, 41 nt, Homo sapiens
aggacaacggcgcgccgccagaaggacgggccaggcgacac

SEQ ID NO: 246572 - RNA, 43 nt, Homo sapiens
aaacgaacgcagaagagagcgagccacagaccggcggcacacg

SEQ ID NO: 246573 - RNA, 82 nt, Homo sapiens
aggcagaagccaggggacaccgccagcccaaacaacggcccagccgcgcaagggcacagaagaaacagcacaaagcacgagg

SEQ ID NO: 246574 - RNA, 40 nt, Homo sapiens
cagcaaaggggcgacacggccagcccaggggacaagaaga

SEQ ID NO: 246575 - RNA, 60 nt, Homo sapiens
ggagcaggccgcgggaggggagcaccgaagagagccagcagaacggccgagcgaccagga

SEQ ID NO: 246576 - RNA, 75 nt, Homo sapiens
gagccggcgccccgcggaggagcccccagcggggcggagcgaccccgcggggcgcgaggagacgagagacggacc

SEQ ID NO: 246577 - RNA, 77 nt, Homo sapiens
gcaaaccgcaagagaggcaaaagacaggaaaagccagagagcggcagagaagaagggaggcccaaagagcaaacaaa

SEQ ID NO: 246578 - RNA, 75 nt, Homo sapiens
cagaagaggagagaggaacccgaagaagaaaggacgacagccagagagaacagagaacgaggaagaaaaggaaac

SEQ ID NO: 246579 - RNA, 77 nt, Homo sapiens
gagagcgcggagcgggcggagcggcgagagcccccacgggacaacaaccgacagcccccccacaaaggcaagacaga

SEQ ID NO: 246580 - RNA, 88 nt, Homo sapiens
aggcccggcacgcgggcggccgcgaaggccacggcaggggcagcgggcgacgcacgaggcacacaggaaggaggggagcagggacgcg

SEQ ID NO: 246581 - RNA, 87 nt, Homo sapiens
ccgggacgccgagcccgacccgggcgccccgccggcaccccgcgcggacaccagacaaaaagaaccccgaagaggacaggaggaagg

SEQ ID NO: 246582 - RNA, 67 nt, Homo sapiens
accgaccagggcaacaccaaaaacaaaacgaaccaggacggcaagagcaagaaggagaggaacgacc

SEQ ID NO: 246583 - RNA, 81 nt, Homo sapiens
cgcggcccgcccgcccagaggcagaagacgcccggcaacgcagaaaaccccgcagaacggaggcacgggccgggcgcagac

SEQ ID NO: 246584 - RNA, 77 nt, Homo sapiens
ggcgcgcagaaccagaccgggagcacgcacccacgaggggccagagagggacaaggaaagcaaacaaacccagacac

SEQ ID NO: 246585 - RNA, 88 nt, Homo sapiens
ggagcaaaaccgggaacagagggacagaggccacgacaggcacagggaagaaggagaaagggccaaccccgaagaagcaaacagaaac

SEQ ID NO: 246586 - RNA, 80 nt, Homo sapiens
cagcaggcaacagcgcaacacaagcacacggaggcccccccagcgggggacccggaccagacccgcacgagccaacaaga

SEQ ID NO: 246587 - RNA, 96 nt, Homo sapiens
cgcaggacggccgcggcaccgaaccacaaggaggacgagcggagccggagcgaggcgggggaggcagcagaagcccgcccccgagagcgaccccga

SEQ ID NO: 246588 - RNA, 94 nt, Homo sapiens
ccagcaccacagcccgcagccccgccagccacccccaggggggaagcgaggcaggaagcccagcacgccgaaggccacgcgacccagggaccgg

SEQ ID NO: 246589 - RNA, 71 nt, Homo sapiens
aacaggggagaaaaaaagggcgcccaagaagccaaaagggaagcacgagaagcaggcaccacagggagaga

SEQ ID NO: 246590 - RNA, 62 nt, Homo sapiens
ggagaaaaggccaagaaggcaggaaggggaggagcacagaacgccaggaccaaaacagggag

SEQ ID NO: 246591 - RNA, 76 nt, Homo sapiens
cccgcgacgcccaagaccgccccagaagggcagcgcaggagcacccccgggagaagagacagacccgaacgcagga

SEQ ID NO: 246592 - RNA, 59 nt, Homo sapiens
aacgcgcagggcagcggcccccgcccgcagggccaccacagaagcaagaggcgaaccaa

SEQ ID NO: 246593 - RNA, 82 nt, Homo sapiens
ccagggaaggggcagcacaaaggccggcccacagcccaaaaagaaacaggaccgaaagccagagcgaagccaaagccggcag

SEQ ID NO: 246594 - RNA, 85 nt, Homo sapiens
ccagggcaacagccgaagagagaacggaacaccgacaagccaccagccgacaacacagagaagccacggggaccggccaccagca

SEQ ID NO: 246595 - RNA, 91 nt, Homo sapiens
gagaagggccgggaccgaaaccagccccggacgagaagcgcagcaacggcgggggaccacgagagcggacagcacagaaggccggcaggca

SEQ ID NO: 246596 - RNA, 62 nt, Homo sapiens
ccgaagccgcagggaggggaaacgaagcgcacgaaacaccaagggagaagaaaaagcagaaa

SEQ ID NO: 246597 - RNA, 61 nt, Homo sapiens
agaaaacacaggagccggagcagaagcaaagagacgaaaaagagccacgcccccacgagcg

SEQ ID NO: 246598 - RNA, 78 nt, Homo sapiens
ccgaagaaaggcgcagccgcaagaggggcacacgcccgcacgagcagcggagaagcggggggagcgagcaggccggcg

SEQ ID NO: 246599 - RNA, 65 nt, Homo sapiens
ccgagcagggggggggggaagccgcagcggaaagcaggagcacaggagggcaccggcgcacccgg

SEQ ID NO: 246600 - RNA, 72 nt, Homo sapiens
ggaggccacaggcgcaagcagcgggagggaagccagccacaccccagagccgggccagaccacaaaacaaaa

SEQ ID NO: 246601 - RNA, 78 nt, Homo sapiens
ccggcaggaaccaccaggacagagcaccaacacagccaacccacaggccacgcagcccggagaacggggccaggcaaa

SEQ ID NO: 246602 - RNA, 76 nt, Homo sapiens
accagaagagagagaacaagcgggagccggcaggaaagcagcagagcagagcgccagagccgaacgcggccccccc

SEQ ID NO: 246603 - RNA, 76 nt, Homo sapiens
ggacaccagcacaccgcggaggcgcccagcacggagaaccacggggaccaagaagcgagcagcccaaacggacccg

SEQ ID NO: 246604 - RNA, 101 nt, Homo sapiens
cgcggggacgccgcggccccaacgcgccccgggacgcacacggcaccaaaccggagcggaggcagacacacacggggggagagggagggggggacacggcc

SEQ ID NO: 246605 - RNA, 82 nt, Homo sapiens
cagacccacacccacggagcaaggaaaaaaacccgacagcagagacagagaggagccaacccccagaaagacggggaccacg

SEQ ID NO: 246606 - RNA, 76 nt, Homo sapiens
gcgagcagaaccgagaagcgccccagaaagaccagaaccgagaagcagcccgggaggagaaaccaacagaccccac

SEQ ID NO: 246607 - RNA, 79 nt, Homo sapiens
caaccccacaccaccgcaccccgcaaacacaacccaaggggagaagggccagcgcgcccggcgggccagccccaggaag

SEQ ID NO: 246608 - RNA, 56 nt, Homo sapiens
caaaaccccacgcgcgggaggagacgggcccccccagcgagacgacgggaccgaag

SEQ ID NO: 246609 - RNA, 73 nt, Homo sapiens
aaaaaaacgacccgaagagaagggggacaaagggacgcccagagagaccagccccaaccccagaaaaccgcca

SEQ ID NO: 246610 - RNA, 41 nt, Homo sapiens
ggcaacccagagaaggcaagcaggaacgacgaagcgggacg

SEQ ID NO: 246611 - RNA, 70 nt, Homo sapiens
acacgcagaagggggaaagagaccgggacagaacaggaccgaaacagcaacaaccgcaacgagcggcacg

SEQ ID NO: 246612 - RNA, 68 nt, Homo sapiens
aggaacggcaccgcggacagagcagacagaacagacaaggggacacgacgggagagaaaacgccagac

SEQ ID NO: 246613 - RNA, 79 nt, Homo sapiens
cggcccgcgggaagcaggacgcgccgcgccccaagggcagcggggaagaagaaaaggaaccgaggccccccggcgacac

SEQ ID NO: 246614 - RNA, 115 nt, Homo sapiens
gagcccaaaccccaggccaagcagccaccagcagcccccagagcgggaccacaggcccgccgccccggggcacgccaggcaaccaagacaacaagccaaagccacaccggggaca

SEQ ID NO: 246615 - RNA, 82 nt, Homo sapiens
cgccaaccacccggcgacggcgcgggacccggcccgcgaggaggaccgcgccaacaggacgaggagaccgaccaggagaccc

SEQ ID NO: 246616 - RNA, 86 nt, Homo sapiens
gaggagaggaggcgcgggcggagcggaaagaggaggagaggggaggaggcgaagccacgacgagacaagccccaggagcaccacca

SEQ ID NO: 246617 - RNA, 74 nt, Homo sapiens
aaccccaggccaaaggcaggacgcgacccgcagaagggaacagcccgggggaggcgcagaggggaacaaacaga

SEQ ID NO: 246618 - RNA, 72 nt, Homo sapiens
aggaggacagggcacagaaaaacaagagagcagacgggcacgaagagggaacagccaaggccacagacaacg

SEQ ID NO: 246619 - RNA, 68 nt, Homo sapiens
accaagaaccagggccaaccaccagccgccagaggaaaagaaggggcccagacagcagcccggcacca

SEQ ID NO: 246620 - RNA, 72 nt, Homo sapiens
aggagcgccacgcgcggaaggcagcgcccagcagcgcaggacaccccccaggcacagccacaccccagcggc

SEQ ID NO: 246621 - RNA, 80 nt, Homo sapiens
gggaacccagacgcaacgaaggcacacaagggaacaacgaagcgaccaagcagcggaagacagcagaaggccccgcaaga

SEQ ID NO: 246622 - RNA, 58 nt, Homo sapiens
cgcagggcgcccccggacgggcagccggagccccagcccagcaggccagcaggggcca

SEQ ID NO: 246623 - RNA, 81 nt, Homo sapiens
ccaaagcaaaaggccagcagaagacaaagaccagggaagagcaagaccggggacacagacaaaacgggccacaggaccaag

SEQ ID NO: 246624 - RNA, 73 nt, Homo sapiens
gggacccgcccagcacgcaggacaaagccgagcagccccgaaggacagcgggaaggagccagccagaaaacgc

SEQ ID NO: 246625 - RNA, 74 nt, Homo sapiens
cacagggagaacagggcagaacgaggggaggaaagcaggagcccaaaagaaacagggcgcaggaaaagacgagc

SEQ ID NO: 246626 - RNA, 56 nt, Homo sapiens
acccaaaaacagaaaacgacacacagcgcaaaccccggagaaaaggccccaaaccg

SEQ ID NO: 246627 - RNA, 65 nt, Homo sapiens
aacaacgcaaagccgggcaaccgggacaacgcgcggcaccagcgaccaggcaagagggaagcaaa

SEQ ID NO: 246628 - RNA, 75 nt, Homo sapiens
cccggaagacggaaaaccagacgagagacagaagacgaaagggcaagaaagagagcacggacaagaggagcagag

SEQ ID NO: 246629 - RNA, 80 nt, Homo sapiens
gaaaaggcgaacccccaggaagaaaaccagagaagaacacagacaggcccgcggcaggcggggccaggcccgagccagaa

SEQ ID NO: 246630 - RNA, 82 nt, Homo sapiens
agacgccgcggacccgggcccaggcgcgcagaacaccgcccagccaagggggagggcagcgccaaacagcgcaaaggcagca

SEQ ID NO: 246631 - RNA, 76 nt, Homo sapiens
gaccacagaccaagacaagggccaaggacaacccaaagacggccaccgcgcaggaccagcaccacggcggacagcc

SEQ ID NO: 246632 - RNA, 88 nt, Homo sapiens
gagagcggaccgagagcgcgaaacgcacgagaaggcaccgggaaaacgcagaggaacgagggggagccacgaggagaaggccacgcgg

SEQ ID NO: 246633 - RNA, 62 nt, Homo sapiens
gagaaggccgccgggcccgggcaggggcggggcaacgcggaagcccaaagagagcaacacac

SEQ ID NO: 246634 - RNA, 78 nt, Homo sapiens
gagcgcgggaggagccgggcgcagaaccagaccgggagcacgcacgccacgaaggcaaacccagcaggaagccacggg

SEQ ID NO: 246635 - RNA, 53 nt, Homo sapiens
acgggcgcccagccaggggacccccaaaagacaagggcaaaacggaccagaca

SEQ ID NO: 246636 - RNA, 80 nt, Homo sapiens
gccggcgacccacaggcacaggccacagccagaaagcagaagccaacaacagcaaacaaaaagagcagacagaaaagagg

SEQ ID NO: 246637 - RNA, 74 nt, Homo sapiens
gggaaagcacagaaagccaaaagacgacaagagaggggacaagagaagcagggaacagcaccccgggacgaaga

SEQ ID NO: 246638 - RNA, 74 nt, Homo sapiens
ccaaggaggaagaggggagggaagaacggccaccaaacgagggaaagaggggcaagggcagacaaacaaaagag

SEQ ID NO: 246639 - RNA, 79 nt, Homo sapiens
agagcccgcgacacacacagaaacccgggagagcagccgaaaagaagcacaaagaacccccaccaaaaaaacaaagcca

SEQ ID NO: 246640 - RNA, 76 nt, Homo sapiens
ggcaaggacaggcacacaaagaaggagacgggggcacgggagcaggaagagaacaggaacaacccagacacccggg

SEQ ID NO: 246641 - RNA, 75 nt, Homo sapiens
agcggccgcgcacccccggccggaggcaccagcagcccaaggggggcaaggagcagcggcacgcaggaagcgcag

SEQ ID NO: 246642 - RNA, 67 nt, Homo sapiens
aaggcaggaagccggggcggaacagggcgcacacccgcacgcaagagaaccacccaaaagaccgaag

SEQ ID NO: 246643 - RNA, 81 nt, Homo sapiens
cgcccgagcgaggcggagaaggaccccggacccccccacgcacgcccgcgccgggaaccaagccggacccaggcacagcga

SEQ ID NO: 246644 - RNA, 84 nt, Homo sapiens
aggcaccgggacggaccgagaccggaccgagagcggaccgagagcgcgaaacgcacgagaagaaacagggcgaggccaccgaaa

SEQ ID NO: 246645 - RNA, 75 nt, Homo sapiens
gacggagccgccccacgcccgcagggacgccagcgcagggaacacccacgacgaaaacgacacacaaggcagacc

SEQ ID NO: 246646 - RNA, 74 nt, Homo sapiens
gaaaccggcaagaaaaccagcaggacaaaaggcaagggcggaaagcgacccaagaaaaaccaagacaaaggagc

SEQ ID NO: 246647 - RNA, 85 nt, Homo sapiens
ccgccgaaccgccggcagccggcgacgaggacgaggcggagggggcagggcagaaggaccaggggcgacgaggcccagagcaaga

SEQ ID NO: 246648 - RNA, 72 nt, Homo sapiens
ccaaaacacaggaagaggaggaaagcaccgcaaggcagagggcagacagacacaggagccgaaaccgaggag

SEQ ID NO: 246649 - RNA, 39 nt, Homo sapiens
ggagggagccagaagcaacgagacagggaggccgcacag

SEQ ID NO: 246650 - RNA, 39 nt, Homo sapiens
gaccgccccacaaaaagggagacgcgcacggaccggaac

SEQ ID NO: 246651 - RNA, 69 nt, Homo sapiens
gccaaagaaaaagggacgagagcacggagggaaggagggcagccaaaaagaggcacccagagcaccgca

SEQ ID NO: 246652 - RNA, 63 nt, Homo sapiens
aaaaggaaccacgaggaggaacccagacagcagcaacaccccgcaagccccagcacgagaacg

SEQ ID NO: 246653 - RNA, 76 nt, Homo sapiens
acagaaagagcaacagcagggcaacagcgccaccccaagcaccggcacagcaaaagaagggaaagaggaaaacccg

SEQ ID NO: 246654 - RNA, 72 nt, Homo sapiens
ggggagaagcaagacggagcggaaagcccacgggggagcgaacgaagaaaggccaagagggagagacaagga

SEQ ID NO: 246655 - RNA, 78 nt, Homo sapiens
gcaggaagaggaccacgagacaagcggcagcgccaacgccgcacgcgcacccgacaaccacaggaaccaaagggaaag

SEQ ID NO: 246656 - RNA, 68 nt, Homo sapiens
gacagaggcagacaacacaaaagggggagaagcagaccgcaccaggcgggaccccgaaaaagcccaaa

SEQ ID NO: 246657 - RNA, 78 nt, Homo sapiens
caacagggcggcaacaggggcgagaaaggcaacaaaaaccccagcaacagggcaaagaggagagcagaggagagaaga

SEQ ID NO: 246658 - RNA, 52 nt, Homo sapiens
gagcaagcggggagaaaccggaccgggggcccgcgcacagaccaaacgggcc

SEQ ID NO: 246659 - RNA, 76 nt, Homo sapiens
ccaggcaagcggaagaaccgaacacacaaagggaaaggggcccagacagcggagcagcgcaagcaagccacaccga

SEQ ID NO: 246660 - RNA, 77 nt, Homo sapiens
caagccgggagcccaccacacaggagcagacaggagaggaacagggcgcaccacagaagagccaaagacggcaaggc

SEQ ID NO: 246661 - RNA, 60 nt, Homo sapiens
caacccgacccgacgagcagaagcaaaaagacgaggagcaagagcggagaagagagaaaa

SEQ ID NO: 246662 - RNA, 74 nt, Homo sapiens
caaagaaaccagagaggcagccgagagacgaaacagagaggagagggcaaacagagggaaacaaagcaaagaac

SEQ ID NO: 246663 - RNA, 82 nt, Homo sapiens
gcgggccgcgcggagccggagggcgggaggaacagacacgcggaggggaaggaacaaagcagagaaaccaaaaggccagacg

SEQ ID NO: 246664 - RNA, 81 nt, Homo sapiens
ccgggccccgggccgcggcgggaggagacggagcccggaggaagaaggagggcgaccgcaccagggccacacggcccaggc

SEQ ID NO: 246665 - RNA, 76 nt, Homo sapiens
ggcgccggaggagcgaccgcggcagcaagcccggagaaaacaggacccggaaggaaacggcgaagaccgccgaaag

SEQ ID NO: 246666 - RNA, 39 nt, Homo sapiens
agaaggaagccggccacagaaaagaaacgaagccgggca

SEQ ID NO: 246667 - RNA, 58 nt, Homo sapiens
cccgaaaaaagcgagacccacacaagaaaggggccgaaaccaaagacccagcaacacc

SEQ ID NO: 246668 - RNA, 73 nt, Homo sapiens
gagcggaaaacggcgcagccaacaagggcaggagagagccaaaacgacaggccagggaagaaaacaagaaggc

SEQ ID NO: 246669 - RNA, 79 nt, Homo sapiens
gcggagaggagagcacacggcaccgagggaggaagcacacacacccgcacgagaccccggcccgcaccgagcgagggcg

SEQ ID NO: 246670 - RNA, 71 nt, Homo sapiens
gagaccagcgccacgaggcgaacccccagaagagcaacggagaagaagcagaacaccaacgccgccaggcc

SEQ ID NO: 246671 - RNA, 68 nt, Homo sapiens
aaaaagaagaccaacaaggaaacaacaggaacacggcccaagcacggcaggaccaaaggaaaccacca

SEQ ID NO: 246672 - RNA, 68 nt, Homo sapiens
aacaaggcaaaaccaagccagccagcaggcaacaggcccagaccaggcccaaagagcccaccaacagg

SEQ ID NO: 246673 - RNA, 76 nt, Homo sapiens
gaagcccaagaagcaagagacgaaggagggagaagaccaaagaagagagagcaggaccaccaccgcccacagccgc

SEQ ID NO: 246674 - RNA, 83 nt, Homo sapiens
caccgccgcccccccagacaagaggacaccgcggaggaaggacccaaagacaggaccacgcaccagcagagaaggaaagcaaa

SEQ ID NO: 246675 - RNA, 63 nt, Homo sapiens
aagccgcagcggaaagcaggagcacaggcagaccgaccaaacagggagcagcggacaggagac

SEQ ID NO: 246676 - RNA, 75 nt, Homo sapiens
ccacgaaacagaccaaggacacccagcaacccagcccgccagccgaccccacacgcgaacgcggggggaagccaa

SEQ ID NO: 246677 - RNA, 70 nt, Homo sapiens
cgcccccggagagagcacgaaggacccagcagggcaccagccagccagcaggcaacaggcccagaccagg

SEQ ID NO: 246678 - RNA, 72 nt, Homo sapiens
gcaacaaagacagcacgcaaaagcaaacgagagacaacgacaaggaggcggagccgggccaagaaccacagc

SEQ ID NO: 246679 - RNA, 66 nt, Homo sapiens
cagccaacagaggcagccaaagaggcacacccagaagccacaggagaagcaagaggcggcccccgc

SEQ ID NO: 246680 - RNA, 77 nt, Homo sapiens
ggcggggggagggcagacacacgaggcccacgcaccgcggcgcgccgcgaaccaggccgggcaccccagcagcccca

SEQ ID NO: 246681 - RNA, 76 nt, Homo sapiens
gccaaaacccgaaaaaggccccccgagaagacccacccagggaacccccccaccccccgacggggcgaggcccagg

SEQ ID NO: 246682 - RNA, 61 nt, Homo sapiens
gcgggacccaagggggccacacagccagagcccaagagcagaaccccggggaggagggagg

SEQ ID NO: 246683 - RNA, 80 nt, Homo sapiens
gcgagcccgaggccaggcgccggccggcgcgaagacgcgggggccgccccccgaaagcaccgggaggaaagagagccaca

SEQ ID NO: 246684 - RNA, 80 nt, Homo sapiens
cccggacccagcgaccggcgacccagcccggccccaaggagagccaggaggagggaggcgagcgaaaagaaggagacagc

SEQ ID NO: 246685 - RNA, 71 nt, Homo sapiens
gcccccccgccggacgaaaccgccagacagagcagcaggaggaaaaaacaagcgaaacgacacgggcgagg

SEQ ID NO: 246686 - RNA, 65 nt, Homo sapiens
cgaggaggcgaagcgcggcgggcagaccaagccaagagaaagaagagagaaaccacagcaacaag

SEQ ID NO: 246687 - RNA, 75 nt, Homo sapiens
ccacgagaaccaggaagggggaaaacacggaaacacccaacaaggaagcgacaaagggcgaaccaaagaaggaag

SEQ ID NO: 246688 - RNA, 55 nt, Homo sapiens
ccaaacgccccacgaccagaggagcaagaggggggggcccccccgaagaaaggaa

SEQ ID NO: 246689 - RNA, 70 nt, Homo sapiens
caggagcaggacggagcgaaccacgacgggagaaaggggcaaagagaaccaggagaccccaccaccacag

SEQ ID NO: 246690 - RNA, 67 nt, Homo sapiens
ggcaccaaacacccagaacaacaaagagccaggacccgaaaagccagcaagcgagaccaacaccaac

SEQ ID NO: 246691 - RNA, 65 nt, Homo sapiens
acacaaggaccagcccaacagggacagggcgaaacaaccaaggccgacaccacacgacaaaacca

SEQ ID NO: 246692 - RNA, 67 nt, Homo sapiens
ggagggcaaaacgccccagaggaaggaaccacgaagcggggccaggcagcacaacgcgaaccgaaca

SEQ ID NO: 246693 - RNA, 65 nt, Homo sapiens
ggagcacaacaggcagacagacaaacgagaaacaagcgaggccaaagcggacagcaaggaccaca

SEQ ID NO: 246694 - RNA, 58 nt, Homo sapiens
aacacagaggccccagaccagaccagaccccggggaaaaacgaggggagagcggaggg

SEQ ID NO: 246695 - RNA, 73 nt, Homo sapiens
aacaccaggaccccggcacaacccgacgacacacacaggagcagagcagaggacaacgagaagacagaccaaa

SEQ ID NO: 246696 - RNA, 89 nt, Homo sapiens
gagaccagcccacgcgagaagaagaccgccccgcccagacggccgaggagaaaggggagcaagaagaaagagcagggaggagggagcga

SEQ ID NO: 246697 - RNA, 83 nt, Homo sapiens
acagcaagagcaaacacagaagggaagaacaaggccaaggcgaaaaccacaaagcgcggcagcaccagccccccagcacagcc

SEQ ID NO: 246698 - RNA, 55 nt, Homo sapiens
gccgcaagccgcgaggccacgccccgcccagagggcggaagggccgcacgaagac

SEQ ID NO: 246699 - RNA, 56 nt, Homo sapiens
cgggggcaggacgagcgcgcgagccccacccagaccaaagggagcggagggagaca

SEQ ID NO: 246700 - RNA, 68 nt, Homo sapiens
aaaaacacagagggcacacggcacagaccaggagagaagacgacgcaccgcaggcagacaaaagggcc

SEQ ID NO: 246701 - RNA, 73 nt, Homo sapiens
aaagacaacaagaaagagaagagcagcaagagcaccacaaccacacagccaaaaaggaaggaaagcccgggca

SEQ ID NO: 246702 - RNA, 90 nt, Homo sapiens
gcaacaaggagaagagccaggaaacaggaggaagaacccaagccaaagcccaggaggggcggggagaggagacggcagggagggggaagc

SEQ ID NO: 246703 - RNA, 104 nt, Homo sapiens
gcagaggcaggaagggaaaaggagggacgccgcagggcggggcgagcggagcacgcaccggacagccagaggagagcgcgggagaccaggagcaggcacagccg

SEQ ID NO: 246704 - RNA, 84 nt, Homo sapiens
gcacgagcccagcggagcgccgcagcacagcgccaggacaaacggggacacggcaacccacacgccagcgcgaagcccccccaa

SEQ ID NO: 246705 - RNA, 73 nt, Homo sapiens
acgagaagacaccccgcgacccgggccaggagcccggaggggaccgagcgcaggccccgggaccaaggacacg

SEQ ID NO: 246706 - RNA, 75 nt, Homo sapiens
acacgacgaccacggcggaggaaggaccccgccaaagcgaggaccggcagcgaagagcaggacacgaggccccag

SEQ ID NO: 246707 - RNA, 79 nt, Homo sapiens
caaaagccaccagaggagggccaggcgacaaagagaaggaaagcagaagccaccgggaaggaagaaagcagagaacggg

SEQ ID NO: 246708 - RNA, 70 nt, Homo sapiens
agagccagaggagggaaggccggacgaagggcaccacggagagaagcggcggagaaaccaccacaaacac

SEQ ID NO: 246709 - RNA, 78 nt, Homo sapiens
gagagcgggagcgggcgggccaggaacgaggcgcgacacaccagcggagcgggggaacccccccgggcagccacgcgc

SEQ ID NO: 246710 - RNA, 69 nt, Homo sapiens
cccgaggaggggacggaggcaacggggacacgcacgagagaccaggcaggaccaagagaaaggaaaacc

SEQ ID NO: 246711 - RNA, 57 nt, Homo sapiens
acgaaaacgccaggcggcgccgcacccacaacagccaggggaaacaacaagccagac

SEQ ID NO: 246712 - RNA, 76 nt, Homo sapiens
cagcgacaacccccagaagagaccaacgccaccaaccaaccggagcagaagcgccagcgcagaccagccaggaggc

SEQ ID NO: 246713 - RNA, 56 nt, Homo sapiens
aaagaaaaggccaaacccacccacagcccgcagacacaagaccccaggccagacaa

SEQ ID NO: 246714 - RNA, 91 nt, Homo sapiens
ccagccgcccaagccgcacagccgcggcggcagcagcaggagagagcgagccagggaggcggcccccagcagccagagggaaggacaggag

SEQ ID NO: 246715 - RNA, 89 nt, Homo sapiens
gacggggccaggaagcaacggaagcgcagcaacagcaagccccgggcaggcgggaaagaggaaagaagacacgcaagagaacacaccac

SEQ ID NO: 246716 - RNA, 101 nt, Homo sapiens
gccacacgcgacccggggaggcccagggcacacgccagggacaacagcgcgcaaagaccagcggacccaaaaacaaggaacacccggcagcgaggcggcgg

SEQ ID NO: 246717 - RNA, 73 nt, Homo sapiens
accacagcccccacagcagcaggagacggaaagaagaccacagaagcaaaaccaaacccgggcagcaccgcag

SEQ ID NO: 246718 - RNA, 60 nt, Homo sapiens
ccaacaaacaaaggggaacccagggaagcaccacgccacccgaaaaacacggagagcacc

SEQ ID NO: 246719 - RNA, 76 nt, Homo sapiens
cggggccaggacgcgggaggaccggacccaaagacaggaccacgcaccagcagagaaggaaagcaaaccgaagcag

SEQ ID NO: 246720 - RNA, 78 nt, Homo sapiens
gaagacgacgcaccgcaggcagacaaaagggccaaagaagggagagaacaggagcgaccaggacacccccgcccgcca

SEQ ID NO: 246721 - RNA, 70 nt, Homo sapiens
agagcgaccaggggcgagagcgggcaccccccaaacgacgcagccacggagagcaacagccaaccagaaa

SEQ ID NO: 246722 - RNA, 79 nt, Homo sapiens
ggcacagcacgagcagacaggcaggcaggacaaggcgaggcagccaacccagagaagcagacgggaggcagcagcccgg

SEQ ID NO: 246723 - RNA, 75 nt, Homo sapiens
cagcaagcaacgagcgcacggcacaagcagagcaaggggagacaaagaccaccaaaaaagcaagagaccacccag

SEQ ID NO: 246724 - RNA, 71 nt, Homo sapiens
gaagccggaagagagccaagccaggcccagcagccgccaccgggaacacaaaaagggcacagaaaaaacaa

SEQ ID NO: 246725 - RNA, 82 nt, Homo sapiens
cgcgacgaggcccgccaagaggcgccgcaggagagccggagcccacggagaggcccggagagaaggaaaacagagaaccaag

SEQ ID NO: 246726 - RNA, 77 nt, Homo sapiens
aaggcacccccccgccggcccaggaccacgaggaagaacggagcaaggccggagcagccagggcgggcacagcgcag

SEQ ID NO: 246727 - RNA, 82 nt, Homo sapiens
gcgaaaacaggcccacgcagagaaacgggcagcaagaccgcccacccgcggcagccaaagaaggagagccagccaggcgggg

SEQ ID NO: 246728 - RNA, 39 nt, Homo sapiens
ccggcccgcaccaggagcggaacaaagaagcagaggaga

SEQ ID NO: 246729 - RNA, 83 nt, Homo sapiens
ggagccggagaacggccaggcggccccgagcggaacggagaaagcgagggaagaagaggagcggagccaaaaaaagcagggaa

SEQ ID NO: 246730 - RNA, 55 nt, Homo sapiens
ggagggacagggccaagcccgaggcaccaaaaaagaaaccccccccaggaggcag

SEQ ID NO: 246731 - RNA, 39 nt, Homo sapiens
gggcagcgcagcggggaggggccccacaccgaccggacg

SEQ ID NO: 246732 - RNA, 36 nt, Homo sapiens
caagacacaaacggcgacacaggagggaagggcaac

SEQ ID NO: 246733 - RNA, 75 nt, Homo sapiens
gggccccgcggaaacgacagcgccggcggcccccacgcaggcagaagccccagaggagcccgaaacccccaggcg

SEQ ID NO: 246734 - RNA, 59 nt, Homo sapiens
ggagacgacaagaccgggacacccgaagcgggaaaggaaaccccccaggcaagaggcgc

SEQ ID NO: 246735 - RNA, 85 nt, Homo sapiens
gccaacggcggccgccccgggcacacccggcccccggacgcccgagaacacaaggaacgaaaggaagggaagaagcagaaccaag

SEQ ID NO: 246736 - RNA, 75 nt, Homo sapiens
ggggccagcaaccaccaagggaacagcacagaggaaccagggaagaaagggacaacaacacagcagaggaaaaac

SEQ ID NO: 246737 - RNA, 68 nt, Homo sapiens
acaccaccacgcaggggaggaaaagcccacacagcccagaggaggggggaagcccaggggaggaagca

SEQ ID NO: 246738 - RNA, 69 nt, Homo sapiens
aaggaaacccaccgaggacagaaaaagaaccgggacgaaacgcaacagaaaagaacagacaagaaaaag

SEQ ID NO: 246739 - RNA, 74 nt, Homo sapiens
acgaggggaccccgagaaccaccaggacgcccaggacgcaacaagcgcgcggcgagagacccaggaggcagagc

SEQ ID NO: 246740 - RNA, 110 nt, Homo sapiens
caaaaggaacgagacccaggagagggcgaagaggagcgcgggcagggccaggaggaggaaggagagaacccgaacgagcgcacggcagcgaagcgccggcagaaccgagg

SEQ ID NO: 246741 - RNA, 83 nt, Homo sapiens
cgagagggcggcgaaggaggcagaggcacagcgcagacggccaccgagacgacagggcgaacaagccaacaggccgcgaaggc

SEQ ID NO: 246742 - RNA, 82 nt, Homo sapiens
aaagagcagaaaaaaaaaaccaaggccaggggcggccgaggaaaagcgcaccaaggcccaaggacaaaagaacgcaaggcaa

SEQ ID NO: 246743 - RNA, 78 nt, Homo sapiens
acagcaagaacccaaaaggagccacagggagcaccggacagcacacaaaaaacagaagaagggcagccaaaacaccac

SEQ ID NO: 246744 - RNA, 61 nt, Homo sapiens
agcggcccagcaaccccagaacgcaccgcaagcccccccgccagaagcagaggaggagggc

SEQ ID NO: 246745 - RNA, 87 nt, Homo sapiens
cacagacggaagcaaggaacaaaccgaagaacagcgggaaagaaggcaaaacacggggcccgagggcaggacagcaggcaccggcga

SEQ ID NO: 246746 - RNA, 64 nt, Homo sapiens
ggcccgggacagcgcacccacacaggagacgaccccagcaaagcgaccggaagggggccaaccc

SEQ ID NO: 246747 - RNA, 86 nt, Homo sapiens
ccggaacccgggccgacagcggaagaccaaagaggagagaaggacgacaagcccaccgagggaacccagaaccgcggaccacagca

SEQ ID NO: 246748 - RNA, 67 nt, Homo sapiens
agcccgcagacaaacgaggagcgccaggaaagaggcagagacgaagcagaagcgaggcagacaagcc

SEQ ID NO: 246749 - RNA, 85 nt, Homo sapiens
aaaagcgcagcgagcggagccgccggaggcaagcgggacaagaagagaaggcgcacagcacacacaaaaggcacaaagcaggaac

SEQ ID NO: 246750 - RNA, 71 nt, Homo sapiens
gcacggggaaaaccaaaacgagggacgggaagacagcaagaggcgaaggagccaagagaccaaccaaggaa

SEQ ID NO: 246751 - RNA, 79 nt, Homo sapiens
cgggaccaggcccgggggcggcggccacgccaaggacggaggaaaagccagaacagcacagacaacacacgagacagaa

SEQ ID NO: 246752 - RNA, 71 nt, Homo sapiens
aaggaccaagaaccaggacacagccaggggagagaacaaaagcagagccaaagccagcaaccaaaaaacca

SEQ ID NO: 246753 - RNA, 87 nt, Homo sapiens
ggagacgccggcggggcagcggccacgggagcgaggccagcacccgcccgaggacagagaggcgagcgcccggaggggagagagcgg

SEQ ID NO: 246754 - RNA, 77 nt, Homo sapiens
ggcgcaaagcccacagaggccaaggcaagccagagaacacccgccgcgcaaaagaaagcccacgccaggaggcaggc

SEQ ID NO: 246755 - RNA, 82 nt, Homo sapiens
caacgcagacccagcggcagcgcaggggcagcgccaggcgggagcggagagccggcggaacgacaagccagacgggagccaa

SEQ ID NO: 246756 - RNA, 61 nt, Homo sapiens
ggggcagacaacggagcccgggaaagcaccgggaggaaagagagccacacgaagaacacgg

SEQ ID NO: 246757 - RNA, 71 nt, Homo sapiens
cgggaaaaaaccaagcagcgagcaccaggaaagcaccgggaaaaccaggaacaggccaggaccggaaggag

SEQ ID NO: 246758 - RNA, 73 nt, Homo sapiens
gcgcgggggacagagacgcccaagcccggggccggcaccaggccgaggaaccggccagcaccaggccaacaaa

SEQ ID NO: 246759 - RNA, 71 nt, Homo sapiens
agggcagggggcagggcggcagagagggaaacgcggccgaaacacagaaggaaaacgcaccacaaacggcg

SEQ ID NO: 246760 - RNA, 83 nt, Homo sapiens
acacgcagcagccgcgccgccgccgcgggagccgcgcccgaaccccggcccgaacccaggaccacacacccccaacacgcggc

SEQ ID NO: 246761 - RNA, 74 nt, Homo sapiens
acaaacaaagacacgggaccacccagggcaaaccccgccagaggcacacacggaaaacgggccacaacacaacc

SEQ ID NO: 246762 - RNA, 65 nt, Homo sapiens
caggcgaaggagccggcggaacaccaccgagcacggcgggagacccacaagaagaacccgcagac

SEQ ID NO: 246763 - RNA, 69 nt, Homo sapiens
gccccaaaacagaggacgcacccagcccggaaaagacccagggcaagccagcgacgagacaccagagga

SEQ ID NO: 246764 - RNA, 67 nt, Homo sapiens
cacaagcgaagaccgaagcccaaagcagcgccaccccaagcaccggcacagcaaaagaagggaaaga

SEQ ID NO: 246765 - RNA, 81 nt, Homo sapiens
gggggccgcggccggcaggaccagcgcgaaagagaccggacgcagccgccaccgagacgagagaaccaggagcggcagacc

SEQ ID NO: 246766 - RNA, 76 nt, Homo sapiens
gcacggagcccaaggggacaggcaaaggagaaacaagaccccagggacgacaccccccagagacacacgcagaggc

SEQ ID NO: 246767 - RNA, 78 nt, Homo sapiens
ggagaagcgcgcgggcgcgcaggccgcggggagcaccgggggccagagaacaagcccagacagcaagacgcgagcgca

SEQ ID NO: 246768 - RNA, 71 nt, Homo sapiens
agaccagaagcgacagggggagaaggaacaagccgcccaaacagcggaggggaagaagaggggcacagagg

SEQ ID NO: 246769 - RNA, 74 nt, Homo sapiens
cgcccaccccacgggaagacgcccgcggaaacgccagagaaagcggcgcgagcggaggagccccgccggggaaa

SEQ ID NO: 246770 - RNA, 63 nt, Homo sapiens
cgcgcgaggagaggagcgcaacagcagcaccaggcgccacagaaagggagaaggcagaagcga

SEQ ID NO: 246771 - RNA, 87 nt, Homo sapiens
ggagagccgccagggccacaaggggcgggacccagcaacccaggcggcggaaggcggaaaggacccggaaaggccaagacaaaggcg

SEQ ID NO: 246772 - RNA, 80 nt, Homo sapiens
cccgaggcggagcccggcccccacagaagccaccgcaagggccacgcgggcagaccgacagaagcgccccccccggacag

SEQ ID NO: 246773 - RNA, 57 nt, Homo sapiens
gcgacacgaacagagggaggagacagaggaggaaacacaaacgggaccacggagggc

SEQ ID NO: 246774 - RNA, 120 nt, Homo sapiens
aaacaggacagcacaggcacagaaggccaaaaaggcaaccacagagagagagagggaggggcgaagacaagacccaaaaggagaccgagagcaaaagaaagacgagaacaggcacagcgg

SEQ ID NO: 246775 - RNA, 47 nt, Homo sapiens
gcccgccgccacacgcgcaaagcccgggaacagggaaaaacaacacg

SEQ ID NO: 246776 - RNA, 96 nt, Homo sapiens
aaaacgggagggaggaccggccagcccccccaaaaaggaaagacaccggcggggaagaacgaccagagacacgaagagaagccacaacgcccacac

SEQ ID NO: 246777 - RNA, 81 nt, Homo sapiens
caaccgcaccccagccacaaccgcggaggcaaccgcgcccccagagcccaggccggcccggagcggccagcccacggcccc

SEQ ID NO: 246778 - RNA, 35 nt, Homo sapiens
gaccaaagcaccccaggagccgggaacgacggccc

SEQ ID NO: 246779 - RNA, 61 nt, Homo sapiens
cggacccaggccaggcagcgcggaggggcgagccagcggccaggggcaaccaaaagccaga

SEQ ID NO: 246780 - RNA, 80 nt, Homo sapiens
gcaaacgcgcccagggggcgaaccgcccgggcacgcccccacacgggggaggcgagcagcccagaccggaaggagggcag

SEQ ID NO: 246781 - RNA, 72 nt, Homo sapiens
gaccccaagcaagccgggaaagaggcaaaaccgagaaaaggaccaaagagagcgagaaagcccaagaaaaga

SEQ ID NO: 246782 - RNA, 79 nt, Homo sapiens
agggcccgacaggcacacagcagacccccaagccccgagaacacccagccccggaagcagacgaaggagaaaagaagcc

SEQ ID NO: 246783 - RNA, 48 nt, Homo sapiens
acacagcaggacaggacaaaagcaggggcacggaagaggacaagaaac

SEQ ID NO: 246784 - RNA, 72 nt, Homo sapiens
ggaccaaacccaggcaaagaagagaaaaaaaccgaagggcacaaaccagaggagcagcaagagggacgagaa

SEQ ID NO: 246785 - RNA, 73 nt, Homo sapiens
cagggccaaaggcaacagcaggacacgcacgccagaacacaaagccaaggccgccgagggaaaccggcacagg

SEQ ID NO: 246786 - RNA, 77 nt, Homo sapiens
gcccagaggagaaagaaggcgcagagcaagccaaggcggggccggggagcccgggccagaccccccagacccagccc

SEQ ID NO: 246787 - RNA, 73 nt, Homo sapiens
gcacccccgcccacacagccggcccccggcccacgcagccccaccaccgcccggagacccacggaccccgcga

SEQ ID NO: 246788 - RNA, 76 nt, Homo sapiens
gccccccgagaagcccagaggcgcccggggcaacgggccgacagcacaggaaacgggagacaagaaccaggcccag

SEQ ID NO: 246789 - RNA, 89 nt, Homo sapiens
ccgaggggagcgcggggcccggcagaaagccaaaacagagggagacgagaaaagggccgagcacaagccaagaaggcgccccaaagcag

SEQ ID NO: 246790 - RNA, 80 nt, Homo sapiens
cggccgggcagagagaaaggaacccggaagagagcgaagaggaaagccgaaggaaagaccacaaaagcaaccgcgcagaa

SEQ ID NO: 246791 - RNA, 77 nt, Homo sapiens
ggccgcaggcccccaccgcaccagcacgagaaggacgagagcggagacgaggaggcacagcaacgaggggacaggag

SEQ ID NO: 246792 - RNA, 80 nt, Homo sapiens
agaggggaggaggcggggaaggcgcgggggcaggcagggcgcgcgggccaaggcccggccaacggcccacgacccacgcg

SEQ ID NO: 246793 - RNA, 85 nt, Homo sapiens
gggacgcaagaaacccaggacgagaacagcaacaggaagccgcgagcagaacgcgccagcaacacgggcgaccagcgagagcagg

SEQ ID NO: 246794 - RNA, 56 nt, Homo sapiens
ggggaggcccccacccccccagcgggcccagaaagaagcggcacggaaggaaacgg

SEQ ID NO: 246795 - RNA, 80 nt, Homo sapiens
acacacagaaggcagggagggaggggaaagacccacaccaagagaaccccaacaagcacaccccagacagagggacaccg

SEQ ID NO: 246796 - RNA, 75 nt, Homo sapiens
gaagacaggagcaaggagaccgaacccgggccacccaggaggggcccgagagaagagaagagcggaggaacagga

SEQ ID NO: 246797 - RNA, 86 nt, Homo sapiens
gagagaaaaggcgccacgggcgagcacacagagaggggaagggcagcagcagcagagaaccaaacccaaagcgaacacaaagacca

SEQ ID NO: 246798 - RNA, 80 nt, Homo sapiens
aagaggagcagcaccaccgagcgggcaccagaaaacccagacaccaagcccccggccaggaagaagagagggcgaaggag

SEQ ID NO: 246799 - RNA, 69 nt, Homo sapiens
caggcagaccacacccacagaaggagagcaaaggagacagggacgcgagagcccacgaagagcgacgga

SEQ ID NO: 246800 - RNA, 60 nt, Homo sapiens
gagaaaaagaaggcgagaggaaccagcaaaaaagagagggaaagaaaggcaaagcgagca

SEQ ID NO: 246801 - RNA, 78 nt, Homo sapiens
aacagccgggcagagcagcagaggaggcaagaaaccccggacagaaggcacggcgaacaaagggcaacaacacaagaa

SEQ ID NO: 246802 - RNA, 72 nt, Homo sapiens
accacacaccagaaccggaggaggaccgcggagggaacaccgaaccagaaagagacaagaagggaccggcgc

SEQ ID NO: 246803 - RNA, 69 nt, Homo sapiens
ccggacagcaggacacaaaccaaaacgagggcaaaagagacggacaagcaaggcaggagaaagcaagca

SEQ ID NO: 246804 - RNA, 75 nt, Homo sapiens
cccacgccgcgcccgcgccgcccagggccagacccccaacacaccagggagaaaccggaggccaggagggacagg

SEQ ID NO: 246805 - RNA, 68 nt, Homo sapiens
cgcagagcagagaaacggagcagagaaccaccaacacaacacggcagagaacccaaccgcaccaaagc

SEQ ID NO: 246806 - RNA, 74 nt, Homo sapiens
ccagcccaggaccccaggggaacaagaggccacgcagagccacgccggggccgcaaggccaggcgcgcagaggc

SEQ ID NO: 246807 - RNA, 83 nt, Homo sapiens
gacccccaggaagagacccagagagcagggaagcaccaggacccgacaaccaggaaggagggaagcgccaaagaagcgacgcg

SEQ ID NO: 246808 - RNA, 78 nt, Homo sapiens
gggaacagacagccccagggagagggaacaccaaccgaagagaaggggagaagcacagaggaaggagacggaaaggac

SEQ ID NO: 246809 - RNA, 85 nt, Homo sapiens
acgcggaggcacacagcaagggccagaggcgggaggggagcaggcgggaacggcgggccaagaaaagaaccaacaccgggccggg

SEQ ID NO: 246810 - RNA, 84 nt, Homo sapiens
aagggcccccgaaggaaagagaggccggggaaagccggggagaaacaaaggcagcgcgccccgggggagcaggcccggcggaac

SEQ ID NO: 246811 - RNA, 74 nt, Homo sapiens
gagaaaggacacacgaaaacagacgggggaacaagaggcaggacgcaccaacccaaaaacccgggaccagcagg

SEQ ID NO: 246812 - RNA, 80 nt, Homo sapiens
cagaggcggcgaccacaggaccccgcacaggcggccgggagcagcaagacgaggacgcgcacaggaaaggacgcggaaca

SEQ ID NO: 246813 - RNA, 72 nt, Homo sapiens
gggaagagaaagcgccacgggccccgccagcagagcgcacccaacgcacccgcacccacaacccacacccca

SEQ ID NO: 246814 - RNA, 67 nt, Homo sapiens
agacgaaaaaagccgagccccgaaaacgaaaaccacgccacagaacggacaggacggggagcaacac

SEQ ID NO: 246815 - RNA, 64 nt, Homo sapiens
aagcagcgacaccagcccccccggggggagcacagaggcaagagcacgggcggcagccccaggg

SEQ ID NO: 246816 - RNA, 88 nt, Homo sapiens
ccccacaccaagacgcagcagccgaggcccaggaggaggaagggaggacggcgaccacgcagggcccccagggccggcacaagcgccc

SEQ ID NO: 246817 - RNA, 74 nt, Homo sapiens
gggacgcaagaaacccaggacgagaacagcaacagagccggaggagccaccaacagaagcaggagccaggaaac

SEQ ID NO: 246818 - RNA, 78 nt, Homo sapiens
gggagcgcggcggagacgagccgagacagagcacgcccgggcccaccaagccgagaacaccaggaaacagcccagggg

SEQ ID NO: 246819 - RNA, 65 nt, Homo sapiens
cggagagggaccgacccgaggccagcagggaaagccccgcagcaacagcacaccgacagagaacc

SEQ ID NO: 246820 - RNA, 78 nt, Homo sapiens
ccggccggcgcgaagacgcgggggccgccccccgcccgagagagacgcagcgcaaggccgggggaggccacaaaacaa

SEQ ID NO: 246821 - RNA, 73 nt, Homo sapiens
gaggcaggccacagagccgacgcaggaaacaccagcaagaagccagagcgaaggaaaaaggaagaaggagaag

SEQ ID NO: 246822 - RNA, 80 nt, Homo sapiens
caagaccgaaggcgccggccaaaagagacaacggaagcaggagcgacaaaacacagccccgaccagcgcccgggaggggg

SEQ ID NO: 246823 - RNA, 68 nt, Homo sapiens
cgcacgaaaccggcaagccagcggaggggaggagaagaaccaacaacggaaaaccagcgggacaaggc

SEQ ID NO: 246824 - RNA, 48 nt, Homo sapiens
ccagaggcacagacaggcagcaggagcgacgcccccaggaacgaaagc

SEQ ID NO: 246825 - RNA, 78 nt, Homo sapiens
cagccgacggagcaggcagcagcccaggccaaaacaaaggggagggaggaggcgagaaggaaacaaaacgagggcagg

SEQ ID NO: 246826 - RNA, 76 nt, Homo sapiens
cccaggcggaacgcccgccccgcagagaggggaaccgcccaaaagcccgccagaagaaggacgggagccaaaagaa

SEQ ID NO: 246827 - RNA, 65 nt, Homo sapiens
gccagcagccgccggagccagccaacgagcgagcggaaccaaccccgccacggcaacaagcccac

SEQ ID NO: 246828 - RNA, 89 nt, Homo sapiens
ggccgccagacacgggggaaaaccggcggcccaagacagggcacaagggcacacggagaaccacggggaccaagaagcgagcagcccaa

SEQ ID NO: 246829 - RNA, 81 nt, Homo sapiens
acccggagcgacaagcgccccgacggagcgccaggacgaacagccagcaaagacaagagcagaccagcagccgcagcgcga

SEQ ID NO: 246830 - RNA, 100 nt, Homo sapiens
gagcgagggagcaagagggcggaggccacgaacacgccggagccgccagaccccaacaggaaccccccggcggcagagagcagaagggccagcgcgaaca

SEQ ID NO: 246831 - RNA, 74 nt, Homo sapiens
gaaggacgggagaacaccccacagggaagagggaagaagagccgggcaagggcacccaaaaaccgaagacgggg

SEQ ID NO: 246832 - RNA, 88 nt, Homo sapiens
gggcccgcgcgcccggccaagaggcaaaggggaggacgcagcaaaccaccagaaggagcagagcagaagcaaaggagaggagagacgc

SEQ ID NO: 246833 - RNA, 74 nt, Homo sapiens
gcggcggcggagcagcgcggggcggccggaggaggacggccggcacgcgcccaaaggcggccggggccgggccg

SEQ ID NO: 246834 - RNA, 67 nt, Homo sapiens
ggagcagcgggcgcggacacgagcgcggggacggacagaggaagcaggccccgggaccaaggacacg

SEQ ID NO: 246835 - RNA, 77 nt, Homo sapiens
aagaaggggaaaccacaccaaaaaaagcagaagcaacaagagagacaagcccggggaggccacgcacgggacggcca

SEQ ID NO: 246836 - RNA, 76 nt, Homo sapiens
gaccggggaaccagcggaccagcccgggaaaaggggaagaaggagaccagaaaagcagagcagacagcgacaagaa

SEQ ID NO: 246837 - RNA, 76 nt, Homo sapiens
gacgccgccgcgcccccgcgagcggcagcccacaagcaggaagaccagccccaggagggaaacagagcacccaccc

SEQ ID NO: 246838 - RNA, 51 nt, Homo sapiens
cacaagaaagggaaacggccggacacaagagggcaagaaaggcgcgacggg

SEQ ID NO: 246839 - RNA, 37 nt, Homo sapiens
gggcgggagcgagggcggaaaagacaggcagggaggc

SEQ ID NO: 246840 - RNA, 88 nt, Homo sapiens
gcgcgccccccccaggcccgccgcccccgccaaggggacgcggacgcaacagggaaaggagaccccaacaagccgcggggcaaaagcc

SEQ ID NO: 246841 - RNA, 72 nt, Homo sapiens
cggccgacggcacgaccgcggacaaggagacgagaggaacacagaaagccgggcgaaccgaacgggagagag

SEQ ID NO: 246842 - RNA, 74 nt, Homo sapiens
ggagcagcccgggcaccacagaaaagcggcggagaaaccaccacaaacacgaggccagcaacgaccaacaagac

SEQ ID NO: 246843 - RNA, 73 nt, Homo sapiens
ggcgagaggagcgggcgcccccccgccagacgcggcgcgcaacgcaagccccaaccgcgaggagagcgcagca

SEQ ID NO: 246844 - RNA, 52 nt, Homo sapiens
ggagaagccggaagaggccagaccggcccgggccgggccaggaggacacgcg

SEQ ID NO: 246845 - RNA, 75 nt, Homo sapiens
ccggagcaagcggagccccccaagagccggaaagcagaaacggggggggagggggacccggaagaggagaaacag

SEQ ID NO: 246846 - RNA, 69 nt, Homo sapiens
aaacgagaaacaggccaacaaaaaggacaccccccaggcacagccacaccccagcggccaaggacgaac

SEQ ID NO: 246847 - RNA, 74 nt, Homo sapiens
aaggaaccccgaagacgaaggcaagacagagacaagcagcacaaaccagaagaaaccaaagccaaagggggaag

SEQ ID NO: 246848 - RNA, 75 nt, Homo sapiens
ggaagcaaagcaccaaagacgagaaagaaacagcaggacaaaccggcgaccacacacggggacgacggggaagcc

SEQ ID NO: 246849 - RNA, 91 nt, Homo sapiens
gggcagccgccgccaccccgcggccgcacccccgccccagaacggcgcacgaccccagagccgcccaacagggaaggagacccacccccac

SEQ ID NO: 246850 - RNA, 108 nt, Homo sapiens
gccccaccagaccccggccgccgaccgcggccccgccggccgccggccgcgcgggggcggggacgacgagcccacggcacaacggaccgacagagcagcaaccggccg

SEQ ID NO: 246851 - RNA, 81 nt, Homo sapiens
gaccgccccggacaggaggagaaggccgccaagcgcgagacgacaggaaaagaagagacccaaagagaagaaacgcgacag

SEQ ID NO: 246852 - RNA, 77 nt, Homo sapiens
cagagcaaagccggcccggccgccagccgcaagagcagaagccaggcagcccacgcgacaaggacagaacgaaggaa

SEQ ID NO: 246853 - RNA, 74 nt, Homo sapiens
gccaagggacgcgcagggccacggccaggcagccagcgacacaccaaagaaaaaacacaccaagcagaaacgga

SEQ ID NO: 246854 - RNA, 70 nt, Homo sapiens
gggaggagcaggagaaggagaccccgggagaagacagggacaagcgcacagcggagaaagcagcgcggcc

SEQ ID NO: 246855 - RNA, 67 nt, Homo sapiens
ggccccaggcgcgccacagccgagccggaacccggcaccagccgggcaaaaacccaaaccaacagaa

SEQ ID NO: 246856 - RNA, 67 nt, Homo sapiens
gaacacagggggaagccaagcagaacaagccaagcaacaggcgcacgcggaggagggcgacgaggac

SEQ ID NO: 246857 - RNA, 79 nt, Homo sapiens
aagagggaaagaagagcagaaacccgccccgagaagcccacaaacaagggcaaaaaacaggcagccagacgaaacacag

SEQ ID NO: 246858 - RNA, 83 nt, Homo sapiens
gcccccacagcaccccgggcggcggagcggcggagaaaccaccacaaacacgaggccagcaacgaccaacaagacagacccgc

SEQ ID NO: 246859 - RNA, 82 nt, Homo sapiens
acgacacgcaagcaggcaaccgaaacaggaagccaggaaaggcagcccagccacggggcaggaggggagagaacagcccggg

SEQ ID NO: 246860 - RNA, 70 nt, Homo sapiens
cccggcgggagaggccaagcgggaccgccagaacaaggaccaggggccggcaaaaccggacccagaggac

SEQ ID NO: 246861 - RNA, 80 nt, Homo sapiens
gaccggccccagaacgaaagagcacacgggagcgcccccgagagaaccaaacgaagcacacgggccggcggggagcaggc

SEQ ID NO: 246862 - RNA, 61 nt, Homo sapiens
agacccggaagggaggcgggagaaggcgcaacgcggcgcggacacaacacagggacgggcc

SEQ ID NO: 246863 - RNA, 60 nt, Homo sapiens
cgcgaaacgcacgagaaggcaccacaggaagaaccaagagagcgcgacaaccagggggac

SEQ ID NO: 246864 - RNA, 73 nt, Homo sapiens
cgggggccccgaaaaaagagagggggggaccgaccgcaacagaacggacccggccgggcccgggaggagcagg

SEQ ID NO: 246865 - RNA, 59 nt, Homo sapiens
cagagggaaagccagagagcagccacacagcaaaagaccggcggcacacggacaaccgg

SEQ ID NO: 246866 - RNA, 68 nt, Homo sapiens
agggccggaaaccggaggcaggaaacgcagcaaagccacgggggagaagacggggcccggagagcagc

SEQ ID NO: 246867 - RNA, 81 nt, Homo sapiens
gcccaagcccagcacgggcaagcgaaccgcaagccccccagccggacccgcacagggcagccgagcagagcgacaaaggca

SEQ ID NO: 246868 - RNA, 73 nt, Homo sapiens
cacccgccagggacgggcacgggaaggcaccggcccgaccagccacgacacccacgaaaggacaggcagggac

SEQ ID NO: 246869 - RNA, 80 nt, Homo sapiens
gacacccgggcggggcagagcagcccccagccagccgcgagcaggaggcaaagggaccccaagaaaccaaagggcaagag

SEQ ID NO: 246870 - RNA, 73 nt, Homo sapiens
caaaggcccaacaaacacggacgcaaaaggaaagggggagaggcaccagcaacagaccaaccgcagcaagcac

SEQ ID NO: 246871 - RNA, 73 nt, Homo sapiens
gcgcccgccccaagccgcagacgcgggaaggcagagcggccggaacaaaagccggaaaaagggaaacaaacag

SEQ ID NO: 246872 - RNA, 62 nt, Homo sapiens
ccggggaccaagaggaggcgggccgaagcaacaagggggccgaagagaacaagagcgggcac

SEQ ID NO: 246873 - RNA, 78 nt, Homo sapiens
gcgacggacgggggcgccgcccgcgcccgggaccgacccccgccgcggccgcgccgaggcgaagagacgacgcggggg

SEQ ID NO: 246874 - RNA, 81 nt, Homo sapiens
ggggcacagcagcagaacggggggaagggcaggacaagaagaaggcagccgaaccgggcgggacagaacacgggacacaac

SEQ ID NO: 246875 - RNA, 80 nt, Homo sapiens
cgagaaacagagagaaaagagacggagcaagagaacgcaagagacggcaaaaggcaaccaaggaaaaaccagcaccaggc

SEQ ID NO: 246876 - RNA, 90 nt, Homo sapiens
caggcccaggaggcagggagcagcagcccccacgcgcacagaggcagccggcgcaggagcagcagcgcaggcggaggcagggcgcaaccg

SEQ ID NO: 246877 - RNA, 67 nt, Homo sapiens
gagggccccaggagcccggacgcggccgcagaccaagaagaaaaacacacgaggaacgccgaagaca

SEQ ID NO: 246878 - RNA, 81 nt, Homo sapiens
gcagaagagcgaaccagcaggcaacaggacaacgagggaaacaaagggacaagcaaggggccaaggagccaaggaggaaac

SEQ ID NO: 246879 - RNA, 79 nt, Homo sapiens
ccgagaggcaaaccgagaaccgggccaaggcgacaaggaggaccacccgggcacccggacaccgcccccgaaagagaag

SEQ ID NO: 246880 - RNA, 72 nt, Homo sapiens
ggaaacagccagacaagaaacacacccaacagaccaggagcgaagagcagcaagaccaaggaacaacagacc

SEQ ID NO: 246881 - RNA, 80 nt, Homo sapiens
agaggaagcagagggggggggccagcgacccggggccgagaagacacgcgcggaaacgcgcgccaggcgcacagcgcacc

SEQ ID NO: 246882 - RNA, 76 nt, Homo sapiens
aaacccaagaacccaaggccagagcagaggcggagaggggcagacccagggaccgaaacgagaaagcccgcaccag

SEQ ID NO: 246883 - RNA, 70 nt, Homo sapiens
agaagccggcagcacagccagaaggcaagcggcagccacacccggagaaggagccgcccagggacgaagc

SEQ ID NO: 246884 - RNA, 77 nt, Homo sapiens
gacgaggggagacggacgggggagagaggccaaacggacaaggcacggcagacacaccgaccagaggaaggcgaacc

SEQ ID NO: 246885 - RNA, 73 nt, Homo sapiens
ccagccaccgaggggggggagacggcaaccagggcaaccgggccggagcgagggagagcaggaacacagagag

SEQ ID NO: 246886 - RNA, 86 nt, Homo sapiens
ccgcgcccggccggacccgggcccgagcgcaccccccggaggcggccgagcccacgcgacgaagaacaggagagggacgaaccgcc

SEQ ID NO: 246887 - RNA, 86 nt, Homo sapiens
cgaggggccaaccagcgaagagcgacaagccgcggcagccgcggaccaccgccgccaggcgagagccgcggcagcccaagcgaaca

SEQ ID NO: 246888 - RNA, 88 nt, Homo sapiens
gccggccccagcagcagaagcgaccagcggggaccaccgaagaagggggccgggggcgaggaagagacaggcgggggagaagaagcag

SEQ ID NO: 246889 - RNA, 58 nt, Homo sapiens
ggaaaagccagaaaaaagggcgcacaaaagagcacaaaagcaccaaggcgcacaacag

SEQ ID NO: 246890 - RNA, 78 nt, Homo sapiens
caagaccacacaccagccggacggcggggccgggcccccggccgcaagcaggacgggcccagggaacacgggagcccc

SEQ ID NO: 246891 - RNA, 53 nt, Homo sapiens
aagcagcagacacagacagacaccaaaggaaccacgcaagagcccaacacccc

SEQ ID NO: 246892 - RNA, 63 nt, Homo sapiens
accagaaagcaccccacaggggagacgaaggagccccaagggaccgcccgcacaccaggggac

SEQ ID NO: 246893 - RNA, 83 nt, Homo sapiens
gagaaagccccccagcacaaggacagcaacagagaggaccaccgcacgacaaaccacggccgagacaagcagcaaacgaaaca

SEQ ID NO: 246894 - RNA, 80 nt, Homo sapiens
caccggaggagcagagggaaaagaacagacacgccagcggaggaggagcaggaacacggccaaagccccagaggacaagc

SEQ ID NO: 246895 - RNA, 75 nt, Homo sapiens
gggggacccggcgcgcgccccaccaagggcgagacaccccgccagggagaagaaaaagcagaaaggaacagaaaa

SEQ ID NO: 246896 - RNA, 79 nt, Homo sapiens
cagccagaaagcggcacgaacagagccgggagcaagaagaacacccagagggcgacaagaagagcgaggaaacaggcca

SEQ ID NO: 246897 - RNA, 62 nt, Homo sapiens
gccgagggcaaggcgccagaccaaggccaaaacagaagaggcaaagcccagccacagcagca

SEQ ID NO: 246898 - RNA, 74 nt, Homo sapiens
cacacgaccaacgcacaccagaggaaggggaccaaaagaggcccgggcaaggggaaggccaaggacgagaaaga

SEQ ID NO: 246899 - RNA, 81 nt, Homo sapiens
gaaggaagagcagcagagcaaccagagcacacgagagggccgggacaaggaaggagagcagcgacaagagggacagaaaag

SEQ ID NO: 246900 - RNA, 86 nt, Homo sapiens
accacacaagagcagcggggggcaggagcggaagcgaaggcacggaaacaggccgagaagaacgggagaagaaaagacaaaacaca

SEQ ID NO: 246901 - RNA, 54 nt, Homo sapiens
accgggcccccacgggccccaggagaacacacaaccacaacaggagaaccgaaa

SEQ ID NO: 246902 - RNA, 60 nt, Homo sapiens
gggaagaggcgggaagggaaagccgccgaggccgcgagcaggcgcgcgccgccacgccga

SEQ ID NO: 246903 - RNA, 80 nt, Homo sapiens
cggccgcgccaggcgggggcccagaagagccaggaacgaaagccaggaacaaccacccggcccaaggaggggagagggcc

SEQ ID NO: 246904 - RNA, 64 nt, Homo sapiens
gggagcccgccacacagcccgacggccagcgcaagcaagagaaaggacagagaaccgagaaaaa

SEQ ID NO: 246905 - RNA, 82 nt, Homo sapiens
gacaacccgcggcgaagacagaacaagcggagccgaggccagagcagaaaccagcccaggaacccagcgccccccacgaccg

SEQ ID NO: 246906 - RNA, 73 nt, Homo sapiens
ccacaacagaccaaacacgaggcggacgcagaaaggaagagcaaaacccaaggcggggcgcccggcccagagg

SEQ ID NO: 246907 - RNA, 53 nt, Homo sapiens
ggagaaggcagcggacaaagaggacggaggggggaggagcaggcccccaccgc

SEQ ID NO: 246908 - RNA, 40 nt, Homo sapiens
ccccgacgccacagaacgcccgggcgcgccaggcacagcc

SEQ ID NO: 246909 - RNA, 78 nt, Homo sapiens
cgccgcgccgcaccccgagcgaccgaggaagcaccaaccgcccccaggggcagcggggagcgggggccgcaggcaagg

SEQ ID NO: 246910 - RNA, 56 nt, Homo sapiens
gagacagccagcccagaccagacaccaaaaaacacagagagcaacacgagcgcaaa

SEQ ID NO: 246911 - RNA, 82 nt, Homo sapiens
agaaggacgccagcggagaacgcggcaaagcgagacaagaggcgcaagaagaaccagacgcggaagaaccagaaaccaagag

SEQ ID NO: 246912 - RNA, 79 nt, Homo sapiens
agcccgcagacagaggggcgacgaccgcacaacagaaagcccacccaccgggccgggacacgaggaggcggcggggcca

SEQ ID NO: 246913 - RNA, 74 nt, Homo sapiens
ggcaccgggacggaccgagaccggaccgagagcggaccgagagcgcgaaacgcacgagaagggcgagaaaaagc

SEQ ID NO: 246914 - RNA, 79 nt, Homo sapiens
gcagaaaaaaccagcaggccaggaacacaacccaccgacagggcggaggagcaagggaacaagagacaaggcagagcag

SEQ ID NO: 246915 - RNA, 81 nt, Homo sapiens
ccagagacaacgagagaacggaagcgaccgggacccaccaggccaggagcaaggggcacagccacagacccaacacacccc

SEQ ID NO: 246916 - RNA, 82 nt, Homo sapiens
gggaggccggcgccgcagcccgggcccaggccccggcagcgccgggacaaggggggagcaaagcgggaaagacccacacagc

SEQ ID NO: 246917 - RNA, 77 nt, Homo sapiens
agacacccgaacacaaaagagccgggcagcgacgacagcccgcgggggggcaccagccggcccggcaggcgggggca

SEQ ID NO: 246918 - RNA, 58 nt, Homo sapiens
aacacacaacacacaggggcacggcagaaaaggcagaggagggaagacccggagccag

SEQ ID NO: 246919 - RNA, 83 nt, Homo sapiens
gacccagcaggcaaacagaccggagaccgcgcagaagacacgcccggaagaccagccaacagaagccagcgagaagaccgaga

SEQ ID NO: 246920 - RNA, 72 nt, Homo sapiens
aggaagaagcgggacccgcagggcaaaggggggaagaacaagcagggcgacagccaggaagccacagaccca

SEQ ID NO: 246921 - RNA, 83 nt, Homo sapiens
gccgccccccggagggaagcccaggagaccaggcagcgcgccgacagccaggaccaggcaaggacggggacacaagaccagcc

SEQ ID NO: 246922 - RNA, 73 nt, Homo sapiens
accagccccggggggaacgggcacagggcagggggcgacggaaaaccggcagcaggagaggccacgccaggga

SEQ ID NO: 246923 - RNA, 75 nt, Homo sapiens
ggccacgcccacagaggcagacccgcagccaacaacaggcacaaagagagaaggaacacccacagggcagacaga

SEQ ID NO: 246924 - RNA, 81 nt, Homo sapiens
ggaggccaagcccaggcccacgcacaagcgggcaccagggccgaccgccgcagggggccaaagggcgagggcacaaaaaac

SEQ ID NO: 246925 - RNA, 85 nt, Homo sapiens
gaagacgagccgggaggaacggcccggaaacaggaggacggcgaaggcgccaccggcgagaagacgcggggacacaccggaggga

SEQ ID NO: 246926 - RNA, 61 nt, Homo sapiens
caagcccccccgccagcccagacacaccagccaggacccggacccgcacggggcggagcga

SEQ ID NO: 246927 - RNA, 77 nt, Homo sapiens
caggcgagaaacggcaagcagaaccagacaaaaacagaaaaagaggcaaaagcaaggcacgcgaccggcccgaggac

SEQ ID NO: 246928 - RNA, 74 nt, Homo sapiens
aaggcccagcgcccgcagaaggccgagaagccacccacgccccggcccgcgacgccaagccagcacaaagggga

SEQ ID NO: 246929 - RNA, 73 nt, Homo sapiens
aaacacaccaaaccagacggaacgagacccacccaccagcacacaccaaccaaggaaaaaaggagccggcaac

SEQ ID NO: 246930 - RNA, 80 nt, Homo sapiens
agagcgagaaacgcggaaagaagcagaagggaagagccccagggaggcccacacaaccacaggaagaccccaaccaggcc

SEQ ID NO: 246931 - RNA, 78 nt, Homo sapiens
ggagccgcacgcgcacggggccaaagaagcccccaaccccgggaaaaaggcacaaaggacaggaacaaagaacaggac

SEQ ID NO: 246932 - RNA, 88 nt, Homo sapiens
agcagaaaccgagacgagaagaagaggacgcggagaggaagacaggcagagcaacagccccacagcaagccccaacgggaaggaagaa

SEQ ID NO: 246933 - RNA, 71 nt, Homo sapiens
ccccggacagggaaaggcaccaggcacagaggagagaggcacacccagaagccacaggagaagcaagaggc

SEQ ID NO: 246934 - RNA, 81 nt, Homo sapiens
cccgggacaagacaccccaggagcccagccacagccaccggacccccagaaagacgcgccagcaggcaacaaaaccaaggg

SEQ ID NO: 246935 - RNA, 116 nt, Homo sapiens
aggcaagaccgaacagaaggaacgacgcggaccagaagccagagcgaggacgccggcagaacacgagcgaagggaagggagagcgaaacgagaacccaggacaagaaacagcacgg

SEQ ID NO: 246936 - RNA, 54 nt, Homo sapiens
gaagcgggacacccgggagcaggaaagggccagagggggcgaccgggacaaacg

SEQ ID NO: 246937 - RNA, 57 nt, Homo sapiens
cgcggggcggaccggagaagccccgagcaccccacagacaacggcaagcggagaaga

SEQ ID NO: 246938 - RNA, 67 nt, Homo sapiens
cgcgaagagccaccacaacagacgcaggaaacacaggggagaagcagaccgcaccaggcgggacccc

SEQ ID NO: 246939 - RNA, 51 nt, Homo sapiens
cgcagaaggggacagaacaacgacaagcccgacacccagcggcaccggaca

SEQ ID NO: 246940 - RNA, 62 nt, Homo sapiens
ccggaccgcagcaacaagccgagagcagccgcagcaggaggaagggaagaccggagacacag

SEQ ID NO: 246941 - RNA, 55 nt, Homo sapiens
gcgcccccaaacgccgagccacggcgacaacaagaagaacaccagcgagcggccc

SEQ ID NO: 246942 - RNA, 52 nt, Homo sapiens
gacgacccgaggaacagagaggaaaaagagagcagccagcgaaaacaaggga

SEQ ID NO: 246943 - RNA, 54 nt, Homo sapiens
agcaggagaaaaacggcagcaggacacaccggaacaaagaaaaccaaaacgcaa

SEQ ID NO: 246944 - RNA, 59 nt, Homo sapiens
gcggagccaacgagcgaccccgagaccccgccgaggcagaccgcccgcagaagaaccga

SEQ ID NO: 246945 - RNA, 52 nt, Homo sapiens
ggccaaagaaagagaaggggggagacaagagaagacgcaggaaaaaaaggaa

SEQ ID NO: 246946 - RNA, 82 nt, Homo sapiens
gcgacccgacccccagggcccgggccaggacagggacacgcgacgacaagcaggagcgagcaggccaaaagggaccggcaac

SEQ ID NO: 246947 - RNA, 80 nt, Homo sapiens
gcggaggccaaccagcgcccgccccgcgcaggccagcagccagcaaacagacaggcgagaagcagacaaagggacagagg

SEQ ID NO: 246948 - RNA, 87 nt, Homo sapiens
acccgggacacagcgccaccccgagcagcggggaagcgaggaggccaccagaaacggccagcgagacccggaggagcggacgggcgg

SEQ ID NO: 246949 - RNA, 78 nt, Homo sapiens
ccaagaaggcagcaggcaacagcagcagagaaaacagcagcagaggggccaagaccaaaagagagcaaccggccccgg

SEQ ID NO: 246950 - RNA, 82 nt, Homo sapiens
ggagcgccggaacgccgaggcccagaccacacgaaggggcagaagagcacaagacggaagagaggagcgaccagacggcagg

SEQ ID NO: 246951 - RNA, 76 nt, Homo sapiens
gaccgcaagcagaccaaagggagaagcagacacggccaacacgcgccagcagggggccccaggacccagcccgaaa

SEQ ID NO: 246952 - RNA, 78 nt, Homo sapiens
aggcgcacaggagaagagacccaagaggaaagaggacagaccccaggaccaagacccgcaaccaggacacagcagaag

SEQ ID NO: 246953 - RNA, 56 nt, Homo sapiens
gaaagcgcgaaggcaaagcagaggaagaacagaggacagagagcacagggcccaag

SEQ ID NO: 246954 - RNA, 83 nt, Homo sapiens
aaacagagacacccagggagaggaaacgggaacagaaagaaaagccgaaagagcgcccagcaggccagggccaagggcacagg

SEQ ID NO: 246955 - RNA, 83 nt, Homo sapiens
gggacccgggggacggcgccagaggacccggccaagcaggggacagcacgagggcagcacacaacacccccccaggaggagac

SEQ ID NO: 246956 - RNA, 76 nt, Homo sapiens
caaggcaagaagaacacccgcggacacgaagcaacgaaaggccggccgaccacgaccacacgaaaccgggagaaga

SEQ ID NO: 246957 - RNA, 79 nt, Homo sapiens
aaacaagagagcagcgcggacacagagaggcccgaagaccccaaagcagccggcacccacagaaacgcgcgcaaaacag

SEQ ID NO: 246958 - RNA, 76 nt, Homo sapiens
agaaaaccagaagcacaaggacagagcacccaccacaggagggaggggggaagacagggcccagcaccacaggacg

SEQ ID NO: 246959 - RNA, 72 nt, Homo sapiens
aacggaccagaccagacgccgcggagccagcgcccggcaaggagcgagcgggagacaccggccggaaagggg

SEQ ID NO: 246960 - RNA, 82 nt, Homo sapiens
cgcagccagacagggagaacaggaaacccaggcccaacggcaggggagcaagaagaaagccccaaaacgacccaggacaggg

SEQ ID NO: 246961 - RNA, 82 nt, Homo sapiens
gcgccccacccgcaccccacggaccgcacgcgaaggcccggaccgcgcccgggaagagcaaggagcaaaccaagacggccaa

SEQ ID NO: 246962 - RNA, 67 nt, Homo sapiens
gagcggggaacaagcacccacgcggaaacacggaccgaagcggcagccaaaaccgggcaccgagagc

SEQ ID NO: 246963 - RNA, 39 nt, Homo sapiens
ggccggcggggcgacaggaggaagagcaagcaggcccga

SEQ ID NO: 246964 - RNA, 82 nt, Homo sapiens
gccgagcggacccaagaggaccacacccaacgcggggcgcaggagaccagaaagacccaaggagaacagggcacaggaccac

SEQ ID NO: 246965 - RNA, 114 nt, Homo sapiens
cagaagaggagagagagcaagagaggaagaagaacgacccgcccggggcagcaggaggaagccaggaaggggaggaaagacgggcggaaccgcaaaggaggggagggagaagaa

SEQ ID NO: 246966 - RNA, 76 nt, Homo sapiens
ggcgcgagccagcggggccgaggcgcaacagaacagcaacaggaaaaagccacgaggagcaaacacccaaaagacc

SEQ ID NO: 246967 - RNA, 59 nt, Homo sapiens
agacagcgggacagccggccaaggagaagcccaccagcaaacggggacagcgccgaccg

SEQ ID NO: 246968 - RNA, 73 nt, Homo sapiens
agcacacggccgggaacggccccgaccacaccggagagagagcagcgaaggaggagagaaagaacccacgcag

SEQ ID NO: 246969 - RNA, 76 nt, Homo sapiens
caccccacgcgagaacgaccacgcagaggaccacccgcacccaggggacgcacggcccaaccccgagcaaggacgc

SEQ ID NO: 246970 - RNA, 38 nt, Homo sapiens
agggaggccagacaggggcgcaggacgaagccagccac

SEQ ID NO: 246971 - RNA, 72 nt, Homo sapiens
ggcgccccaacaacgggcaccggggccacccgccgcggggcacgcaaagaggcgcgcaggggggccagcgca

SEQ ID NO: 246972 - RNA, 80 nt, Homo sapiens
ggacgcggggggaccgcccggcgaccgcaccccccaggagcggccaagaggaccccggcaagcacccagaccaccccgcg

SEQ ID NO: 246973 - RNA, 72 nt, Homo sapiens
agccacaaaaaaggaagcgaaagcgcccggcgcaggccaaagggcccccgaaccagcgaaaacaaacccggc

SEQ ID NO: 246974 - RNA, 80 nt, Homo sapiens
gaaagcacaaagcaggagaccccccccagacgacgcagccagagcagcaagaggccaaggggacgacggccacgggcccg

SEQ ID NO: 246975 - RNA, 72 nt, Homo sapiens
aagagcccaacagaagcaagaagagagaacccaacagacaacgacgaaagacccacagaagcgcgccgggcg

SEQ ID NO: 246976 - RNA, 57 nt, Homo sapiens
accacaaacagcaacacagaacgcaagaaggcaccaggggcggagcgggggaggccc

SEQ ID NO: 246977 - RNA, 69 nt, Homo sapiens
gaagcgcgcgggcacgccgcggccacgcgccggcgaaaagccaggagcaaaagacgagcgcgacgccac

SEQ ID NO: 246978 - RNA, 77 nt, Homo sapiens
caggaaaaccggccacaaaaccagagcggagacacccaggaggcagaagccaaaaacagaaacgccggagaggaaaa

SEQ ID NO: 246979 - RNA, 83 nt, Homo sapiens
aggagaagcagaacccagcgaaggacgaaagcaaaccccacgagaacaaagcacggcagaaacggaaaaaaaccaagaaagcc

SEQ ID NO: 246980 - RNA, 82 nt, Homo sapiens
acagggaaccacacacaaaagcacacaaagaccccccccacaggggagacagagaaaccccacaagacgaagcagacgggca

SEQ ID NO: 246981 - RNA, 68 nt, Homo sapiens
ccaacacaccgagcagggaagaaaccggggcgcgacgagagaccgcgcacacgggcccagaagcagcc

SEQ ID NO: 246982 - RNA, 79 nt, Homo sapiens
acggcaggagggaaggagaagcccaacaaagccccacagcagccagaaggaaagccccacccaagaagagcgaggcggg

SEQ ID NO: 246983 - RNA, 79 nt, Homo sapiens
ccaggacaggacccagcgcgggacagccagacacagaaaagcccacgaggaaaaacggccaacaaaaacacagcgcaga

SEQ ID NO: 246984 - RNA, 43 nt, Homo sapiens
gcgcaacgcgcaccaacccagaccggacaccccaggaacacaa

SEQ ID NO: 246985 - RNA, 80 nt, Homo sapiens
aggcggcagaccgcccccccagccgcgcggcccccagaccccggcgcggggaggcacagcgagaagggaaggaagcccag

SEQ ID NO: 246986 - RNA, 113 nt, Homo sapiens
accggcggccccaccagcagacgcagccgagacaccagcccgaaacaccaccaagacagaagcgaaggggacagggggagaaccgccagggaaacccgggggacagacacaag

SEQ ID NO: 246987 - RNA, 76 nt, Homo sapiens
cagacagaaagaggccccccggaggggcggaccggcgcccagaagccccgggagacaaaacagaggagaccagacc

SEQ ID NO: 246988 - RNA, 65 nt, Homo sapiens
gcgagagacaccaagggggagacacagccagagcgaggaaaacccagcccggacgccacaagaga

SEQ ID NO: 246989 - RNA, 71 nt, Homo sapiens
ccccgaggcagagacagggaggaggaagccagggccgggaagggagcccaaaacaggagcgcagcaagcac

SEQ ID NO: 246990 - RNA, 73 nt, Homo sapiens
acaagcgaggaagcaagaagaagcagacacaggccggacagacacgcaaaaagaagaagaagaaccaacgagc

SEQ ID NO: 246991 - RNA, 78 nt, Homo sapiens
caagccgccaggaacacaaagaaggggccaagcgacagagaagcgacggaacagaaggagggagaagaaaaggaccca

SEQ ID NO: 246992 - RNA, 76 nt, Homo sapiens
ccgaggaggcccgcggggcaaccgccacgagacaccaaggagccaggaggcgacaagacaggacccgaagaagcac

SEQ ID NO: 246993 - RNA, 56 nt, Homo sapiens
ccccgacccacggccaccaaaaagagaaccggggcaagagacggcagacaaacaca

SEQ ID NO: 246994 - RNA, 79 nt, Homo sapiens
ccggccaccggcggcaagccagaacccaacaaggaggccagggcggccagaagcagcagcccgcacccagcacccacag

SEQ ID NO: 246995 - RNA, 86 nt, Homo sapiens
aagcacaaggaccgcggacagagacaacaccgagagagaagccccagccaacccgaaaaccccccagcggccacagagagcacaaa

SEQ ID NO: 246996 - RNA, 71 nt, Homo sapiens
cgcagaagcgcggcagggagcgcgggggcccgcgcagcagcgaccacgggaaacccagacgacaaggaagg

SEQ ID NO: 246997 - RNA, 72 nt, Homo sapiens
ggacacgcacagcggaagaaaggcaggagagagaacacagaaaccggcggcagagcaggacccacacgacac

SEQ ID NO: 246998 - RNA, 95 nt, Homo sapiens
gaacagccaggcccgggccaagaacgggaaaacggcagaaccagcacaggaaagaaagaagaggccgaaagcagcgaaacaacgaaggccgagaa

SEQ ID NO: 246999 - RNA, 87 nt, Homo sapiens
gcagacccggcgccccaaggagaaaagaaagaggggcgggagacaccaggcgccgagaaggccagcagagaaacaggcaggagaggc

SEQ ID NO: 247000 - RNA, 81 nt, Homo sapiens
aggaggcacaaggccacacaacggaccacacaagcagggccaaccgccccccagcagcaggcacgggcgaaccccgagccc

SEQ ID NO: 247001 - RNA, 77 nt, Homo sapiens
cagggccccggcgccgcccccgacgcgccaggacccaaagacaggaccacgcaccagcagagaaggaaagcaaaccg

SEQ ID NO: 247002 - RNA, 75 nt, Homo sapiens
ggaaccgggacccgggcgcccgcgcccgccccaacccagccacaggaagcccggggcggcgacggagcacgaccc

SEQ ID NO: 247003 - RNA, 69 nt, Homo sapiens
agaagaggcccgcgaagacaaaaaacccaagaacccaaagggggccaggaaccagaagacgaggaagag

SEQ ID NO: 247004 - RNA, 75 nt, Homo sapiens
gcacagccgggccgcgcgaagggcgccaagccggcaagagaaagagaggccagaacagccggcaagagcacagga

SEQ ID NO: 247005 - RNA, 67 nt, Homo sapiens
gcagcgacagccggcaccggggcgccggcaggagcacgcacgccgcagccaagccggaacaggagcg

SEQ ID NO: 247006 - RNA, 75 nt, Homo sapiens
gccgggcgcccccaggacgacgggggagccggaccgcccccagccgacaggagaagcgccacccaaggaacgcac

SEQ ID NO: 247007 - RNA, 69 nt, Homo sapiens
cacagaacaaggcgcccaagcaccaagaagcgacgagaagccacacacacggccgaaagcgaggcgacg

SEQ ID NO: 247008 - RNA, 68 nt, Homo sapiens
cagcagacccgggcaacgggccacagcagcaccagggaccagaaaagacaggacaggggaggcaagac

SEQ ID NO: 247009 - RNA, 81 nt, Homo sapiens
ggcggagaagaccaaaagagagccccccaagagaacccagggggagccacgccggagcgggcaccggcgcggacccaccgg

SEQ ID NO: 247010 - RNA, 79 nt, Homo sapiens
gccaagcaggagacagccaaggggagaccacaccaagcgggagacacaccacgccaaggaccaccccacacagaccgcg

SEQ ID NO: 247011 - RNA, 69 nt, Homo sapiens
ccacggaccagcagcgccgagggaaacccggagaccaaaccgacaagaacgagccagcaaacccgagga

SEQ ID NO: 247012 - RNA, 111 nt, Homo sapiens
gagaagcaaggagcgaaacgcagcaagaaaggagaaccgagcgaaagaggcgacgaaagcagagagaccaagcgagacggccggccgccacgggggccgagcggggggaga

SEQ ID NO: 247013 - RNA, 79 nt, Homo sapiens
gaaggcccaccgaacagaggagcgagaaagccggccccagcaccaccaagggggaaagcaggggagaaaagaaaagaaa

SEQ ID NO: 247014 - RNA, 81 nt, Homo sapiens
aaacggaagggagaacgagaacacaagagcaccagcagcaccggaggagacaagccagcacggcggagcgggaccagccga

SEQ ID NO: 247015 - RNA, 74 nt, Homo sapiens
cgggaacccccacgcggccagcgaaaacgcccaggagagaaaggccagcacgggggaacaaagggaccggaaag

SEQ ID NO: 247016 - RNA, 81 nt, Homo sapiens
aaaagcagaagaaaccagaggcaaaaaggaaacacccgcgagcaaaggaagcacgcagcccggcagaaagaaggggaaaag

SEQ ID NO: 247017 - RNA, 74 nt, Homo sapiens
gcaaacacacaagaggggacaagaccagaaccaggacccaaaaaacacggagcagggggccgagcaaaccgccc

SEQ ID NO: 247018 - RNA, 56 nt, Homo sapiens
agaggaccaacagggcagagagcaagggacgggcgcggcgacgagggaggccccgg

SEQ ID NO: 247019 - RNA, 56 nt, Homo sapiens
cgggaccccggaacccgcgcgcgcccacgacgccgaggcagcgggagagaggagag

SEQ ID NO: 247020 - RNA, 85 nt, Homo sapiens
cgggcgaggcggcccagcggcggcaggaaggagggccccggagcagccacaccaccgaggccccacccagcacgagcacagcccc

SEQ ID NO: 247021 - RNA, 83 nt, Homo sapiens
gccgccgccgccgccgccgccccggcgaggcgcagaaaccccggacaaggcacgccagacggccacagaccggaggagagcgg

SEQ ID NO: 247022 - RNA, 64 nt, Homo sapiens
cggagccgagcgggaggaaaaccggaccgacccccgacgggcggaggaaacggagggagcggcc

SEQ ID NO: 247023 - RNA, 56 nt, Homo sapiens
aagaacaagacccggcaggagccccagggcacgacgcgaaagagacgacgcagcac

SEQ ID NO: 247024 - RNA, 72 nt, Homo sapiens
cccgagaccccgacccagacagccagaaacggcggcgggccggacccggcagggaggcccgacggagacgag

SEQ ID NO: 247025 - RNA, 74 nt, Homo sapiens
aaccagaggacgccccagagaccaggacgaggcccaaagagaggccaagaaaggagcgagggacggcggcgagg

SEQ ID NO: 247026 - RNA, 80 nt, Homo sapiens
ggagagaaaagccaagggacacaaggaggaagagcgagagaagaagcagaaggcaaacacagccccccagcaagccccga

SEQ ID NO: 247027 - RNA, 69 nt, Homo sapiens
gccaccagcacggaccaggaggcgagcaacaggagaaacaggaagacaaccaccagaacaaggagacca

SEQ ID NO: 247028 - RNA, 86 nt, Homo sapiens
acggcgggagcccagagagaacccgggagaaaggcggagaagagcagcccagacccacgagaaacgcaccgcccagccgaaaacaa

SEQ ID NO: 247029 - RNA, 74 nt, Homo sapiens
gaggcaaagaggaacagggcaaagagaggacagcccaaggcggaaaagcgaaggaagccacaagcacagcccac

SEQ ID NO: 247030 - RNA, 69 nt, Homo sapiens
aacgcccacagaacaccgagacggaggagaccaggaggaagaagccaccaggggcacaagaacagcgcc

SEQ ID NO: 247031 - RNA, 52 nt, Homo sapiens
gcaccagacgcccagaggaggacccaccacccgagcccagaggcccggaagg

SEQ ID NO: 247032 - RNA, 75 nt, Homo sapiens
ggaccaggcccagaggccggcggcagcagcccagagcgcaaagacaacacagaagggaacaagcggacagaaaaa

SEQ ID NO: 247033 - RNA, 73 nt, Homo sapiens
caagacccgcgccgccgggacccccaggacgacggaccggacacaccggcgggaaaacggcacaaggcgacga

SEQ ID NO: 247034 - RNA, 77 nt, Homo sapiens
cggggcggcccaccccccacgcaccgcacaacaagaggccggcggggcgacagcccagaaccacgcacagggcccgg

SEQ ID NO: 247035 - RNA, 56 nt, Homo sapiens
ggaacaccaccaaaaacaggggaagaaggaccgggaaaaggccccagaagaggacg

SEQ ID NO: 247036 - RNA, 77 nt, Homo sapiens
ggccccacaccgggcccccggggccccaggccccaagccccacaccccaccagggcggcgacggcggcgcgaggacc

SEQ ID NO: 247037 - RNA, 80 nt, Homo sapiens
gcccagcaggacgcggaaacaccccggaggcgacccaccccccagccccgccggccgggacgcacaccgagacgaacaca

SEQ ID NO: 247038 - RNA, 83 nt, Homo sapiens
ccagggcacggccgggacggcaggagacgcaaaacacgggaggaaggaggcaggcccaggccacccagcccacccacgcaacg

SEQ ID NO: 247039 - RNA, 79 nt, Homo sapiens
aaaagcacccacagcacagacacgaccagggacagacaggacgagaggacagaacgaggcaaccaggggaaagaacaca

SEQ ID NO: 247040 - RNA, 72 nt, Homo sapiens
accgggacacaacgcaagcgcgcaccagaccgaagagacacgagaggcggagcgcagacacaaacgcccacc

SEQ ID NO: 247041 - RNA, 79 nt, Homo sapiens
aagaagaaaggaaacgcagagaagaaacacggcaaaaagaaaaaccagcgaagcacagacccccaggccaaggaaagcg

SEQ ID NO: 247042 - RNA, 82 nt, Homo sapiens
gagagagacagagagagcagggacaggaaaggagggggcgcgcagccacagacccaggagcggggcgaaacaccggaaaacg

SEQ ID NO: 247043 - RNA, 67 nt, Homo sapiens
acaaacacacaaaagggaacagcgcaggaaaccccaaagagaggagaaacagcgacgacccaaaggg

SEQ ID NO: 247044 - RNA, 65 nt, Homo sapiens
agaacaccagggcacggcaggggggccagaggacgcccgcagggcagaccccaggaagacacccc

SEQ ID NO: 247045 - RNA, 58 nt, Homo sapiens
caccacagaaacaaaagcaacaaagaggaccgccaccggcggacgaccccagggacag

SEQ ID NO: 247046 - RNA, 77 nt, Homo sapiens
ggaaacgccgccccaggcaacgcacgccgcaggcggagcgcccaaccggagcccaggcccacgcggaccggcagcgc

SEQ ID NO: 247047 - RNA, 79 nt, Homo sapiens
cccccgggcccgcgcccggggccaggcccagggggcaagaccaaccagccggcacaccagggaaagaccacagcaagac

SEQ ID NO: 247048 - RNA, 41 nt, Homo sapiens
gggaagagacaggaagagggcccagacgacaggaggcacga

SEQ ID NO: 247049 - RNA, 81 nt, Homo sapiens
cggggcaagaagcgggggaccacgcccacaaacgcgcaaaggggagccgcacagcacacacggagacaagggcgggccccc

SEQ ID NO: 247050 - RNA, 77 nt, Homo sapiens
cggcgaaccagggcaggggacaggcaaaacgcgaacaacccacagaagcccaacagggccccagggcagccaacccc

SEQ ID NO: 247051 - RNA, 82 nt, Homo sapiens
cgcgaaggaagaggacgggggaggcggcggggaccgagccggagcgcgggcggaggcaaaccgacaccagcgacacaagcgc

SEQ ID NO: 247052 - RNA, 71 nt, Homo sapiens
acgagggaagcaaacagaaaagggaggggggacaagagaaaaaaagggcgggcgaacaaaaagagcagagg

SEQ ID NO: 247053 - RNA, 44 nt, Homo sapiens
caacaagggccggaccacccagacccccacaggcgcgccgagac

SEQ ID NO: 247054 - RNA, 71 nt, Homo sapiens
ggcggcgaagaaggaggcaggcacggacccgagccccaaagacagaaaagccccgagacggaagagaagag

SEQ ID NO: 247055 - RNA, 82 nt, Homo sapiens
gagcgaagcgaggacacacccaggaaaagaccaggacggacaagcacagccggaaggaaaagccgagaagagcagaagcccc

SEQ ID NO: 247056 - RNA, 72 nt, Homo sapiens
agcgcaaaaaacagccaccgagcagccgagcgcgaggcgaagaggagaggaaggcaccaaagacagaacaaa

SEQ ID NO: 247057 - RNA, 67 nt, Homo sapiens
aggcgccgcaggcgcgggggacggccccggggggcgcgcccgccgacgggaagcagagccccgggcc

SEQ ID NO: 247058 - RNA, 77 nt, Homo sapiens
cccccaggaggccccaccgaccccaggcaagaagggacaagacggacagaaacgaacagcgggcgagccaggggagc

SEQ ID NO: 247059 - RNA, 55 nt, Homo sapiens
agagcagcaggaaaccgacgaacaacacaggaccaggcaagggcagacgggggag

SEQ ID NO: 247060 - RNA, 41 nt, Homo sapiens
gaggaaccaccaagaggcaacaaggagaaggacccaggacc

SEQ ID NO: 247061 - RNA, 78 nt, Homo sapiens
ccacaggcccagggcccggcccggacgcagccaggccacaggcagcgaacgggaaagaaccggagaagcacaaggggg

SEQ ID NO: 247062 - RNA, 73 nt, Homo sapiens
gaagcgacgagccgcgaggaggcaaaccagacccaacacgccggaggggcccaggacacaacagagagggacc

SEQ ID NO: 247063 - RNA, 54 nt, Homo sapiens
ggaacaaagacccagggagaaacaaggagaagacaccacacccccaccggaaag

SEQ ID NO: 247064 - RNA, 39 nt, Homo sapiens
aggggcccagagacgggagcagcaagaccagcagaggaa

SEQ ID NO: 247065 - RNA, 81 nt, Homo sapiens
ggaaaccaggggagagggacccaccacaaaggcccacaaccccggaccgacaggaaagaaggagcccacaaagaaaagaac

SEQ ID NO: 247066 - RNA, 82 nt, Homo sapiens
gcgaccgcacggcaggagaccaaggaaaggcccgagcgcgggacagaggcggcccacggcgcagcgcggggcgcacgacccc

SEQ ID NO: 247067 - RNA, 81 nt, Homo sapiens
accggacggccggacccagcaccggcccggcccgcgaacgcgagcacgcgcggaaacccaaaggcacacagagaaaaaaag

SEQ ID NO: 247068 - RNA, 70 nt, Homo sapiens
aaaggagacaaagccacgaaagcagagcggagaggggcaggacagagacggaacagaagacagaaaagaa

SEQ ID NO: 247069 - RNA, 85 nt, Homo sapiens
agcagggccccacccggccgcccgcccagcgccgcccccggagggcccacgcagcgccggacaagacagacaagcagacggggcc

SEQ ID NO: 247070 - RNA, 76 nt, Homo sapiens
acccgaacgaggagacgggcccccaaaaagcggcaaaagcaagagaacagagggcgaagacaggacggcccaggca

SEQ ID NO: 247071 - RNA, 77 nt, Homo sapiens
ggaggacacgggggccacaaagccccccggagacgcaaccaagggacggaaaaggcgcacacgacccggagaacccc

SEQ ID NO: 247072 - RNA, 81 nt, Homo sapiens
caggcagagacgggggaagcagcacgggacccagcccaggccgcacggacggggggggacacgaagcagaggagccagacc

SEQ ID NO: 247073 - RNA, 68 nt, Homo sapiens
acggggcgaggaacacgggaagcaggagcgaaagcgccggaagggcaaaaccggagcaggcaagggcc

SEQ ID NO: 247074 - RNA, 59 nt, Homo sapiens
cagcaccaaacaacaccaaaggaaagacccaaacggaacaggacggaaaagcgggggga

SEQ ID NO: 247075 - RNA, 65 nt, Homo sapiens
ccgccggaaccgacaaacagcgaacccacccaacacggcaaaacaaagacaccacacccaaaagc

SEQ ID NO: 247076 - RNA, 83 nt, Homo sapiens
gacccagacacaacccggccacgaggcccgcgcacgacccagccccagaggacaccagcgggcagacgggagagaagcgccgg

SEQ ID NO: 247077 - RNA, 73 nt, Homo sapiens
aaacggaagcgcagggagaaggaagaggggaaaaggcaagagggagaagacagcgaccagggaggcaacaaca

SEQ ID NO: 247078 - RNA, 64 nt, Homo sapiens
ggaaccgggaggcgacgcacacgagcggaggcgaagaagaacagagcgccgggacaggaaacca

SEQ ID NO: 247079 - RNA, 79 nt, Homo sapiens
gaccgcgagggccaagaagcgggcggcggccggcccggagcgagcaggaggacgagggaccccagcgacggcaacacaa

SEQ ID NO: 247080 - RNA, 96 nt, Homo sapiens
gcgacccccaacgccaagcagcccaccgacaggcccggaggcagcagaaggaaaagcaacaacaggagaagagaagccagaaaagcaacaacagaa

SEQ ID NO: 247081 - RNA, 72 nt, Homo sapiens
gccacgaagccagcaccacgagcaccagaaaacaccaggagaaaccgaaagcaagagacggggcaccacggg

SEQ ID NO: 247082 - RNA, 56 nt, Homo sapiens
caggggacaaaggagccaggacaagggagaaacaaaaggaacacagaaggaagaac

SEQ ID NO: 247083 - RNA, 70 nt, Homo sapiens
gggagggcacaaagagaacgagcaaggcgcacgggcgaggacagggagccaccaaccacgcaaccagcca

SEQ ID NO: 247084 - RNA, 56 nt, Homo sapiens
cgacgccccaaaccgccaggagaaaaaagccgcccggggagaggaaccaaccacca

SEQ ID NO: 247085 - RNA, 69 nt, Homo sapiens
cgacagacacaccacggcacgagaagagaagcccagagcaaaacaccccaaaccagaccaccgacgccg

SEQ ID NO: 247086 - RNA, 79 nt, Homo sapiens
ccccggagcggcggaccccggcagggaagaacgcgcccgagagcagagcacagcaagaccagaagaccccaagaagacg

SEQ ID NO: 247087 - RNA, 82 nt, Homo sapiens
gcggcagagcaacagaaaagcaggaacaacagagcaggcccgccgggaagaaagaagcgaccagaaggggaggcaggccgag

SEQ ID NO: 247088 - RNA, 72 nt, Homo sapiens
ggcccccaaaaagcggcaaaagcaagagaacaggaccacgaaaaacacacaacacgacgcagaccccaaaag

SEQ ID NO: 247089 - RNA, 61 nt, Homo sapiens
cacagcaagacgccaggaccccggaagccagaaagacccacaggaccgcgaacaaggaggc

SEQ ID NO: 247090 - RNA, 82 nt, Homo sapiens
ccccgcccggcggggaagagcgccgggcacaggcacgcagcggcccgggacacgcccgcggacggcccgagcggcggggagc

SEQ ID NO: 247091 - RNA, 67 nt, Homo sapiens
aagaggagcagacaaaaccagaaggcaggagaacacccacacgaggcaccccacagccggcaagcca

SEQ ID NO: 247092 - RNA, 79 nt, Homo sapiens
gaggacgacgacgaggggaacggcagacggacagacggggagaaggccaaagaagaacggcggaaggaggcaagcgcca

SEQ ID NO: 247093 - RNA, 78 nt, Homo sapiens
gccgcccaccagggccaccagcgccccgggaaaaagccgacaaccccggaacgcgggcaaaaggccccaggggaccgg

SEQ ID NO: 247094 - RNA, 82 nt, Homo sapiens
aagagccaaagcagccacacaacagcgcagaagcacaggcagaaccggcgacgcggcgcgcgcagcgcggcccagacccagc

SEQ ID NO: 247095 - RNA, 72 nt, Homo sapiens
gagcgcagcagaggcaagaaaaaggccagacaggcaagaggaaccagccagagcagagcaggacagcgccag

SEQ ID NO: 247096 - RNA, 75 nt, Homo sapiens
cgggaaagcacaaagcaagagacagcgaggacagaaggaaggacccaccgaccagcagcgcgaagccggcaaaca

SEQ ID NO: 247097 - RNA, 83 nt, Homo sapiens
ggggccgccaggcgcccggacgccgggccgagccgcaccggagcgccgcgcgggaggccccgagccccggccccaaagaccca

SEQ ID NO: 247098 - RNA, 84 nt, Homo sapiens
ggacaggcaggagcgaagcagcagaaccccaggcgggacgggccccacgaaggacggccagcgcggcagggaggagagacagaa

SEQ ID NO: 247099 - RNA, 50 nt, Homo sapiens
gcgccaggccaaagacccggaacagagagcccccagcaaccagagaggag

SEQ ID NO: 247100 - RNA, 72 nt, Homo sapiens
ccagggccagcgcgggggacgaccaggacaaaccggcgaccacacacggggacgacggggaagccggacagc

SEQ ID NO: 247101 - RNA, 71 nt, Homo sapiens
aaaaaccgaccccggggcccaaacacaacgcccgggaaggagggggcgaaaaagggccaccacagagcccg

SEQ ID NO: 247102 - RNA, 72 nt, Homo sapiens
aaagcaaagagagagagagaaagagacaaggccgacgcgcacgaacacgggggcaaagacagggagagagga

SEQ ID NO: 247103 - RNA, 50 nt, Homo sapiens
accaagaaccagggagcggcaggggaggcgaagaagagcccggacagaaa

SEQ ID NO: 247104 - RNA, 77 nt, Homo sapiens
ggaggagggcagccaaccaccagcccgggggcagcagaccaggaggcagaaggcgaggacgagaggagacaagagcg

SEQ ID NO: 247105 - RNA, 131 nt, Homo sapiens
gaggagagaccgggagaagagggcacaggcgcccacccgagaacacaaggcggcgagggaaaaccccgccccggcccccacgccggcgagccccaggcagggccagagggggccagggccccaaacaggac

SEQ ID NO: 247106 - RNA, 62 nt, Homo sapiens
gcaggcagacaaaagggccaaagaagggagagaggggaagaaggacggaaacgcgcaggacg

SEQ ID NO: 247107 - RNA, 83 nt, Homo sapiens
ggaggaccccagacaccggagacgggaaagagccgcccacgaggacgcgggcccagggcgggcgggccccccaacagaggcgg

SEQ ID NO: 247108 - RNA, 78 nt, Homo sapiens
gaggcccgcaacagagggaaagccggcgagagaagaacggcgaacgccagaccagggacagggggcagcacggaacca

SEQ ID NO: 247109 - RNA, 80 nt, Homo sapiens
cggcgcgcgcggcgcgggacgcgcgcgggcacccacggagccccggggcgcgcgagcaaggaaccccgggccccgccacc

SEQ ID NO: 247110 - RNA, 100 nt, Homo sapiens
cggcacgggccgcagaagacagggcggcgggccggacgacaaccagaagaggaccacagcaaaaaaaaagacgagcaagggggagcccaccagcgcccag

SEQ ID NO: 247111 - RNA, 87 nt, Homo sapiens
cgggcgccgagccgcaggagagacacgcgggccgaccccagagcggcgcggacagccacagaaagcccgccccagacagggccccgg

SEQ ID NO: 247112 - RNA, 83 nt, Homo sapiens
cgaccgcaacacgagcaggcaggccccgcaggccacccaggcccggaggcagcgcagagagaagaagaaggaggccgcggcca

SEQ ID NO: 247113 - RNA, 66 nt, Homo sapiens
gggcgagggacagccaggcggggacaccagaacgcaaaaacaggagccagggaacacacacccgag

SEQ ID NO: 247114 - RNA, 83 nt, Homo sapiens
ggggcccgcccgcggcccccgcgcggaggacaccagccagaagaggaccacagcaaaaaaaaagacgagcaagggggagccca

SEQ ID NO: 247115 - RNA, 54 nt, Homo sapiens
aaaagggccaaagaagggagagaggcacgagcggaagaagaggcacaaagcagg

SEQ ID NO: 247116 - RNA, 80 nt, Homo sapiens
gccacgcgcccggacggccgggggcgcccgcagccgaaagaaccaaaggcagacccagaagagcacaaaacagagaaaag

SEQ ID NO: 247117 - RNA, 71 nt, Homo sapiens
accccgcgccccagaagggaaggcagccaccgaggaaaaggagaggccacaaaacacgcaggcgaaggggc

SEQ ID NO: 247118 - RNA, 62 nt, Homo sapiens
agacaagaaagcaggaagcagagcaggagggaagaggagaggggccgaagacgcagcagaag

SEQ ID NO: 247119 - RNA, 37 nt, Homo sapiens
cgacaagaagacgaagaaggggagcccggacagcaca

SEQ ID NO: 247120 - RNA, 71 nt, Homo sapiens
cccacacagccggccagaagcggcgagagacagagcgaccagccgcccggagaagacaggggaaaaaggga

SEQ ID NO: 247121 - RNA, 71 nt, Homo sapiens
gaagaacacagcagcagaaagaggaaacggacaggcccagaccaggaccaacaagcacaaggacgcaagac

SEQ ID NO: 247122 - RNA, 84 nt, Homo sapiens
cggccgaggacggggacagcgacgacgcggaggcagagaagggaacgcccggcccagccccaagcgcagcacacgcggaagcca

SEQ ID NO: 247123 - RNA, 38 nt, Homo sapiens
ggaccgccggagacagggcaagaagaagacggcacggg

SEQ ID NO: 247124 - RNA, 76 nt, Homo sapiens
cgacagggacaacaaaggcgagcaacacaggggcagaaccaggccaaacagccacaccacgaggcgagccaagagc

SEQ ID NO: 247125 - RNA, 63 nt, Homo sapiens
cacccaccacacaccagagcacaagaagaggcaagcagggagcaaaagagacaggacacaacg

SEQ ID NO: 247126 - RNA, 85 nt, Homo sapiens
gggccggggcgccgccgggcggccgggcgcggcgagcccagcgcgccccagaccaccggcagggaacagccgagcagaccgagga

SEQ ID NO: 247127 - RNA, 76 nt, Homo sapiens
gccgacgcagccaaaggagaagccccaggagagaaggacccaggccggacccagcagggcccccggaacaaacccg

SEQ ID NO: 247128 - RNA, 67 nt, Homo sapiens
ggcggcccaacccaccggggaagggaagaacgagaacccaaaaggaaaaaggcagagaaaaccagag

SEQ ID NO: 247129 - RNA, 33 nt, Homo sapiens
caccccacgggagggcagggacagacagcagcc

SEQ ID NO: 247130 - RNA, 67 nt, Homo sapiens
cgacgcaccgcaggcagacaaaagggccaaagaagggagagagggggagagacaaccagagcggaaa

SEQ ID NO: 247131 - RNA, 36 nt, Homo sapiens
caaagcagcgaaaggacaggaggccagggcacggga

SEQ ID NO: 247132 - RNA, 74 nt, Homo sapiens
caggaagggaaggcccgccccagccaggggcggggagaacaaaacacccacggggggggagcccaccagggcag

SEQ ID NO: 247133 - RNA, 69 nt, Homo sapiens
agacggggcaaccagggaccgcgaagggcaaggggcggggagagggacagggaaagggcagaggggagg

SEQ ID NO: 247134 - RNA, 83 nt, Homo sapiens
gacgacaaacacgcagaggaaggagcagcgcaaggagagggcggggacacagcgggcaggaagaagacgccgaggccccccca

SEQ ID NO: 247135 - RNA, 54 nt, Homo sapiens
ggaggagccgcagccaaaaggaacagccagcaaagacaagagcagaccagcagc

SEQ ID NO: 247136 - RNA, 105 nt, Homo sapiens
aaagggccgaaagcagaagaaaagggacgcaagaaacccaggacgagaacagcaacaggcgaagagccaccagcggcgacgcaggccaaaaccaggaccggagaa

SEQ ID NO: 247137 - RNA, 78 nt, Homo sapiens
agaggaccagagcggacccgccagcgaaggggaaagagcacagaggccgggaagaaggagggacacagcagcgcggag

SEQ ID NO: 247138 - RNA, 60 nt, Homo sapiens
gcggaagccccgaaaccccaggacccagacacagccgccgacccccggcaaagcaccaga

SEQ ID NO: 247139 - RNA, 42 nt, Homo sapiens
ggggggggcaaacccgagagaacggaaagcaccgggaggaaa

SEQ ID NO: 247140 - RNA, 83 nt, Homo sapiens
cagacgcacgggaccggacccgcagcgcggcaccagggccacggggcggacgcacgacgaggcgggggaaggagagcgaacgg

SEQ ID NO: 247141 - RNA, 54 nt, Homo sapiens
aaggaggaagaagacaccggggacagacagggcgagcagcaggagagagcccac

SEQ ID NO: 247142 - RNA, 86 nt, Homo sapiens
gcgaagacccggccgcccagagagcgggggggggaccgccggcacgcgacccccccgggcccaaagccgacgcccgccgcggccgg

SEQ ID NO: 247143 - RNA, 63 nt, Homo sapiens
accaacgaagaccgaagacaaaaagcagacccacccagaacagcaagaagagaaagccaaagg

SEQ ID NO: 247144 - RNA, 58 nt, Homo sapiens
gagacagcccgcacggaccgggaagagaaaagagacgaaggggaggaccaggcggcga

SEQ ID NO: 247145 - RNA, 31 nt, Homo sapiens
gagcacccaaccccgcgggccggagacacca

SEQ ID NO: 247146 - RNA, 77 nt, Homo sapiens
gacacaggggcccgcacgagccaaaggacacagcaacacccgaaagaccaccgccagggagaaaacccacacaggca

SEQ ID NO: 247147 - RNA, 63 nt, Homo sapiens
aaggggggaccgcggcgcaggacgccgacacgggccgcgccaggagggggaagacagagaaga

SEQ ID NO: 247148 - RNA, 65 nt, Homo sapiens
ccgcaggggagaagcaaaggaccaaacccgaccgagaaacggggccgggagaggaaggccccaag

SEQ ID NO: 247149 - RNA, 75 nt, Homo sapiens
cggaggaagacggggcgcgggccaagcccggagaccagcacgaccgaaccaaacacagccggagccgacggaggc

SEQ ID NO: 247150 - RNA, 74 nt, Homo sapiens
gggcgggcccggaggacgagacaaaaagaaccccgaagaggacaggaggaaggcaaggaagcaggaacccagcc

SEQ ID NO: 247151 - RNA, 76 nt, Homo sapiens
cacccgccgaagcgccggcgcacggcagacagagacgcagcaccgacggaggccagccccagacacaacccgaaaa

SEQ ID NO: 247152 - RNA, 75 nt, Homo sapiens
gcccggaccgaaggcgcaagagggaggcgcacacacagagagcacaggagcacgggagcaggggcagacacggga

SEQ ID NO: 247153 - RNA, 82 nt, Homo sapiens
ggggagcacagagcgagaccaggaaagaagggggcagaagagggggaccgccgcccacccgccacccagaccacacacccac

SEQ ID NO: 247154 - RNA, 72 nt, Homo sapiens
gaagaaagacggcggaccgcgggggagaacggcacaccaaagggaaccaagaagggacccaaaaagacggac

SEQ ID NO: 247155 - RNA, 69 nt, Homo sapiens
gaggcgcgagcccagccgcacccccaaaacacgccagagcacacaaagggcaaaccgacacaaagcgag

SEQ ID NO: 247156 - RNA, 76 nt, Homo sapiens
gggagcacacgaaggcagaggaaacgaggagccggccgacaaaggaaagggcgccaacaaaggagagaagaaaaca

SEQ ID NO: 247157 - RNA, 77 nt, Homo sapiens
cccacggccgggcaccgaaagagacgaagaggagcagaaccagaagggacacacaggacggcaggaaggccagccac

SEQ ID NO: 247158 - RNA, 72 nt, Homo sapiens
gagagagcgggccagcaaacccgcccgagggcaccacgccaccgagagaggcaaccaaaggggagcacagcg

SEQ ID NO: 247159 - RNA, 55 nt, Homo sapiens
acaaaaaaggaagcgaaaaaagcaccgggaggaaagagagccacacgaagaacac

SEQ ID NO: 247160 - RNA, 83 nt, Homo sapiens
gacccaacacgaagaaaccggaacgcgaacagcgaggcccgagaccaggggaacaggccgagagcagccagaagacaaagagg

SEQ ID NO: 247161 - RNA, 89 nt, Homo sapiens
cgcagcagccaccagcgcgggacgcggcggcagcggcggcggcggcggcccccggcccccccgagaaaagagaaaggaagaaggacaca

SEQ ID NO: 247162 - RNA, 81 nt, Homo sapiens
gcccccgcgcccgccagcccaacagaggagcgggcgcggggccccaggagcgagcagagggccccgggagagaagccgccg

SEQ ID NO: 247163 - RNA, 76 nt, Homo sapiens
ccccgacccccagacgccggaaagaaggcccccgcccgagagaaccccagagggcgcggaagccccagcaaacaag

SEQ ID NO: 247164 - RNA, 74 nt, Homo sapiens
gagccaaggcgccaccaacagcccggcagggaaagcaaagacggaggagaggaaaaacgggaaagagcgcagag

SEQ ID NO: 247165 - RNA, 102 nt, Homo sapiens
aaagccgaagaccccggagccccagccagggaaccacggagcacgagaaaacggcggggggccagcacgaaagcagccaggagaagagcacaagaaacaaga

SEQ ID NO: 247166 - RNA, 88 nt, Homo sapiens
aagcagcagcgccggagcccgagggacggggacggagagaacacgagcccacaggagacaagcgcaagcagccagagcccgggcgcaa

SEQ ID NO: 247167 - RNA, 95 nt, Homo sapiens
ggacagggaacagccagacgagagccagccacacgaggagacggaaccggagaaaaaaagcccaagcgcaaaaaaaaggccccaacaaaacacag

SEQ ID NO: 247168 - RNA, 69 nt, Homo sapiens
acaggggcggaaaaaacaaggcaggaaaaggaagagcaaaaacaaaaacccagcagacaaaagacagaa

SEQ ID NO: 247169 - RNA, 112 nt, Homo sapiens
ccgggcccgcagacggcaggagcagaccaaaggcacaggaagaagcgcagaggcgggaggcggcagaagcagccagaggagggcacaggcggcgcggagcgcgccgagggca

SEQ ID NO: 247170 - RNA, 71 nt, Homo sapiens
gaaggaccagcgaccgaaaaggaagaagcacaagagcaccaggagagaaccgggaagaagcagcaagaggg

SEQ ID NO: 247171 - RNA, 76 nt, Homo sapiens
ggacaagcgaggaagcaagaaccgcagccccccccaagacgaaaggcagcggcgcccacggccaggaagggcgccc

SEQ ID NO: 247172 - RNA, 74 nt, Homo sapiens
cacaccggagagacgaggggaaccgacgcaaccgaggccgagggcaggaccgaacacgaagagagaaaaccgag

SEQ ID NO: 247173 - RNA, 82 nt, Homo sapiens
cgggaccccacaagcagcccaggagaaaacggaagaacgaggggagaagccccccgacagcagcggaaggaaagcagaagca

SEQ ID NO: 247174 - RNA, 79 nt, Homo sapiens
accacagaagagccacacccagacaggaaacaaaaaagagcaggaacaaggccagaaagaagacaccgcaagaaacaaa

SEQ ID NO: 247175 - RNA, 77 nt, Homo sapiens
cccagcaggcgggccggagcccacgaccacacaccagggcaccgaggcggcgcgcaggccgccgaaagaacacgggc

SEQ ID NO: 247176 - RNA, 62 nt, Homo sapiens
gcgcggccaggagcgcggagcggcccgcgagcgcagagggacgcgggaaacagcggaagagg

SEQ ID NO: 247177 - RNA, 80 nt, Homo sapiens
ggagcccacagacacagcgcaacagaaggaccaaagagagcacagagcaagaaaccgacagaaggcgccaggaagacagg

SEQ ID NO: 247178 - RNA, 81 nt, Homo sapiens
ccccccaaacgcaaaagccgccccaaggggacagagccgaggacacagaccccagaaagaagacagaagcaaaagagacca

SEQ ID NO: 247179 - RNA, 71 nt, Homo sapiens
gacaagaggcgacgcgaaccggggcacgagggagaggccgagaagaaacagggaacggagcccgcaagaag

SEQ ID NO: 247180 - RNA, 37 nt, Homo sapiens
ccgacagccgcagaacaaagaagcccggcgaggccgg

SEQ ID NO: 247181 - RNA, 52 nt, Homo sapiens
gccaaaaacagagggaagggacaagacggacagaaacgaacagcgggcgagc

SEQ ID NO: 247182 - RNA, 80 nt, Homo sapiens
cggccgaggcgccgcggcggccgggaccgcggcgccccagagcggcagcaacagccggcagggaaaacgcggcgcaaaaa

SEQ ID NO: 247183 - RNA, 93 nt, Homo sapiens
gcgcagaggggcaggagccgggagccaccgcgaagggagcagaagaggggaagaaagagacccgcgggccccagacacacaagcccagaacga

SEQ ID NO: 247184 - RNA, 67 nt, Homo sapiens
ccagcgcagcagagcgccaagacgggcccggggagcgggagccggggcacggcgccagcgacgcggg

SEQ ID NO: 247185 - RNA, 51 nt, Homo sapiens
agaagaagagggcaccaacagcgaagcgggaaagaaaccagaagaaaagag

SEQ ID NO: 247186 - RNA, 75 nt, Homo sapiens
acccagcagcaccagacgagcacagccgggccccagacagccaccccacgcccaccacccagcaacgccagaaag

SEQ ID NO: 247187 - RNA, 79 nt, Homo sapiens
gcccacggaccgcccacaaggaagggccaggggcaaggacgaaggagacgcaggagggagagcagccagaggaagaaga

SEQ ID NO: 247188 - RNA, 83 nt, Homo sapiens
gccggcaggcgagaaaagcgagaccgcggcgaggaccgccacacccaccgcccgggcaggccacggcggagagggccgggcgc

SEQ ID NO: 247189 - RNA, 92 nt, Homo sapiens
cgacccaccgcaaggcggaggcggcccggaccgaaggagaagaaggagaaggggaggagaaggcaagccggaaagagcgaaagaaagaaggg

SEQ ID NO: 247190 - RNA, 74 nt, Homo sapiens
gggaccaccggacagggaggcgagcagcccagaccggaaggagggcagagacagccccaagaacggcagcgagc

SEQ ID NO: 247191 - RNA, 76 nt, Homo sapiens
cgaccccggaagcgagcgcggacgccacccgggggcacagcaaggacaagcagaccggaagaccgacggaagacca

SEQ ID NO: 247192 - RNA, 65 nt, Homo sapiens
gcccgcagccaggcgcggaaggaggcacaagacagcccaacgccaagacagacgggccagggggc

SEQ ID NO: 247193 - RNA, 120 nt, Homo sapiens
agcggggccaccgcaccacgcgcgccgcggggccgccgcgacagccgccaacgcccaacgccacgagagacaaggggccccgggaacacagcccggggggccggggagagaaggcgcggc

SEQ ID NO: 247194 - RNA, 63 nt, Homo sapiens
ggcagggccggggaagcaccaaaggccggaggcaccacaacaccccacagggacacaagcagg

SEQ ID NO: 247195 - RNA, 84 nt, Homo sapiens
cgggaccagaggcacacgccggcaggcaggagcggaggaggcgcaggcagagggagccacaggagaaagaagaaacaaagaggg

SEQ ID NO: 247196 - RNA, 55 nt, Homo sapiens
ggcgcgccgaaagcggcggcgcccagcggccacacgccccaagcgccacgcccgg

SEQ ID NO: 247197 - RNA, 69 nt, Homo sapiens
acggggggggacagcgcaccacggaccgcaagcagaagcccacggcgggaggcgccccgcgccagcacg

SEQ ID NO: 247198 - RNA, 59 nt, Homo sapiens
aaaccgaagaacagcgggaaagaaggcaaaacacgggagggcgcgcgcccagaagaggc

SEQ ID NO: 247199 - RNA, 77 nt, Homo sapiens
agaacacgcagaagcccccaggacagaccgagcccccggaaaccccagggggcagcacgccgaaggagagaccagac

SEQ ID NO: 247200 - RNA, 78 nt, Homo sapiens
caagggcaccaccccgagagaggacgaagaacaaggccccgagccccggccccaaagacccaaaacagagacaccccc

SEQ ID NO: 247201 - RNA, 71 nt, Homo sapiens
gcgggggaagccccccccgagcacgggcccgccgggacgagaccgaggagggaggaagagaccaggcccgg

SEQ ID NO: 247202 - RNA, 75 nt, Homo sapiens
cgcgaacccgcagaagccggcacaggcgcaccagcaccacagccaaaagcaccacaaccggagcgaaaacgccgc

SEQ ID NO: 247203 - RNA, 81 nt, Homo sapiens
caccaaccggacgaggcacggcacgcacacggcacgaggagaccgccgagaagcacagacgggaacggagccccccgcaca

SEQ ID NO: 247204 - RNA, 68 nt, Homo sapiens
caaaaggagaagaaacggacagagaacgcaggccaggccccaacagccgaacgaaaacccccaacgca

SEQ ID NO: 247205 - RNA, 76 nt, Homo sapiens
gaggggaagcgggacagggcgaggcaacaacagaaaaacaagcagaaaaaaacagacggaacggaacgaccgcaga

SEQ ID NO: 247206 - RNA, 32 nt, Homo sapiens
ccgccgcacaacgcagggggggaggagggaca

SEQ ID NO: 247207 - RNA, 77 nt, Homo sapiens
agccagggaccgcggccagcgacagaccgcgccgcgccggcgagggaaccaagaccaggacaaagaagacccggaga

SEQ ID NO: 247208 - RNA, 83 nt, Homo sapiens
aagcccacacaacccgaccaccggagaaccggggcgcaccgccaagagcgggaccagcaagaaggaagagcaagcacaacaaa

SEQ ID NO: 247209 - RNA, 59 nt, Homo sapiens
cacaagcaagcgaaggaggccagaagaccagaagcgacacaacgagggggaaccaaggg

SEQ ID NO: 247210 - RNA, 82 nt, Homo sapiens
agcaacacagaagcaggaacacagcccagaaggggacgaacagcaacaggccaaggagaccgagagaaacaagacaaaacga

SEQ ID NO: 247211 - RNA, 54 nt, Homo sapiens
ggggaagcgggaaacccacaggaggcaaccacacagagcacagggaacaccaga

SEQ ID NO: 247212 - RNA, 72 nt, Homo sapiens
cgggaaagggacaagaagggcaaagccgaaacgaaggagcaagggcaacacccggagagaagagccgcaacc

SEQ ID NO: 247213 - RNA, 59 nt, Homo sapiens
cggggcagcgggccggcgccggcgcggaaggaaaccagaggaggaaggcaagagaacca

SEQ ID NO: 247214 - RNA, 80 nt, Homo sapiens
gaaaagccagaaagaaccacagaacaaaaggagccaaaaaggcaacaaaagagggaccgcacggaccggccgcccaggcc

SEQ ID NO: 247215 - RNA, 72 nt, Homo sapiens
ggaagagcgcagaagccggaagagagccaagccaggcccagcagccgccaccgggaaacggggcggaccaga

SEQ ID NO: 247216 - RNA, 80 nt, Homo sapiens
ggcacccggacaggaggagccagggcccggcccgaaaggagagccgaaagggcacacggcccgaacaagggaacaccagc

SEQ ID NO: 247217 - RNA, 77 nt, Homo sapiens
ggccggacagcccaaccgagaggggaagcaaaaggggagggaccaagaccagaagacgaaagcaggcaccagcaaga

SEQ ID NO: 247218 - RNA, 77 nt, Homo sapiens
gggaaaagggcacgaggccggaaccgcccagccccgaaccccccaaaaggagcgagaaaaagaggaccccggcgcgc

SEQ ID NO: 247219 - RNA, 79 nt, Homo sapiens
cggacaagccgcccccgcaggaccacgcaccccaacccacagaacccagaagaccaggccgaccagagagagcccaccc

SEQ ID NO: 247220 - RNA, 85 nt, Homo sapiens
ccggagagcgggccaccacgggacccaccgcccggcgccccagccgccccggcgaaggggagcaagggagaaaagcaaagggaag

SEQ ID NO: 247221 - RNA, 78 nt, Homo sapiens
gaggcggcagggggaggggaggggagggggcgcggggaacgggagcggagagagggagcacagcgcggaagccccgag

SEQ ID NO: 247222 - RNA, 80 nt, Homo sapiens
cggcacgacaccgccccaacccacgagaggacagcccagacgagggcacccagaaacgccaacaaagaccggcagagcca

SEQ ID NO: 247223 - RNA, 70 nt, Homo sapiens
gcggaaggcagcgcccagcagcgcagggaagcccagaggcacggggcagaacaccaacagagggccgacc

SEQ ID NO: 247224 - RNA, 89 nt, Homo sapiens
ggccgaggagagcaccgggaaagccccagaacagcccgggcccccacagcccagcccaaagccccaccccaagaacccccagcgggaca

SEQ ID NO: 247225 - RNA, 82 nt, Homo sapiens
gaagaagcaacaacccccccgcccgccacagccggcagcgcgaagcagcaaccagaacccaggagaaacgagagggacagca

SEQ ID NO: 247226 - RNA, 77 nt, Homo sapiens
agcaaccagagggccagagggaaggacaggcaccgaaggacagaagaggacccagccaacgacaagaagaggaagcc

SEQ ID NO: 247227 - RNA, 81 nt, Homo sapiens
agagaagcaggaagagcacggacggagcagaacagagaacgaggaagaaaaggaaacccaaaaagacaaggccaagcagca

SEQ ID NO: 247228 - RNA, 82 nt, Homo sapiens
cagagggggaaagccaaggaaaaacggagagccacaaaaaaggaagcgaaagagcaccacgaagaaacgcccagaggagcca

SEQ ID NO: 247229 - RNA, 81 nt, Homo sapiens
gagaagagccagagggacacgcgggcacggccggaggacccacgccgggaaccccaccaaggaaagccggcacccagagag

SEQ ID NO: 247230 - RNA, 69 nt, Homo sapiens
agagcgcagagacagagagacggccgccacagcccagacggcgaaagcgggccaagagacccccgcccg

SEQ ID NO: 247231 - RNA, 85 nt, Homo sapiens
cgccaggagcacagaagagcgaggaggcccgaaggcccacaggacagagcccacagcacccccagcccgcagccaccacacgaag

SEQ ID NO: 247232 - RNA, 74 nt, Homo sapiens
aaccaccaagaagcgccagccccagccaagcaaagggagaagacaagcgaggccccgcacaccaacacagacac

SEQ ID NO: 247233 - RNA, 73 nt, Homo sapiens
gagacagaaagagccgaaagaagccaagccagcagacggggccagcaagcacaccaagagcaaggaaagacgg

SEQ ID NO: 247234 - RNA, 61 nt, Homo sapiens
gcaaagaagagaacggagcacaagaccagaaacacccagggacaaagcccccagaggaacc

SEQ ID NO: 247235 - RNA, 79 nt, Homo sapiens
cacggaggcccccccgccccaggaacgccgggaaagagggagacaaaaccacacaggaaaggacccagaaaaaggaaag

SEQ ID NO: 247236 - RNA, 65 nt, Homo sapiens
gaaagagccagaagcaccgaggacaccgccaccgaccaccccgaaaccacacgcaaagcagaagc

SEQ ID NO: 247237 - RNA, 68 nt, Homo sapiens
cggcaaacaaggcgggggacccagcaggcaggagggcagaagacccgagcggcccgagacaaggggac

SEQ ID NO: 247238 - RNA, 78 nt, Homo sapiens
cagccaaccaaagacgggaacaagggagggggacagaccaaagaggaggagaggaagagaggaaaggggaacaaaggg

SEQ ID NO: 247239 - RNA, 72 nt, Homo sapiens
ggaaaaacacagagacagacggcggcaggagacaaagcggaaggccaagcagggcccagagaaaccgacgac

SEQ ID NO: 247240 - RNA, 51 nt, Homo sapiens
cgcagggcgcccccggaagggaaacgagacagccacaccgcaaccacaccg

SEQ ID NO: 247241 - RNA, 83 nt, Homo sapiens
accacccgggcacagcaggcacggagccaggacggcaacccccaccccaaccagcgccaccgcagccgccacccgagcccgag

SEQ ID NO: 247242 - RNA, 61 nt, Homo sapiens
aaacagcggaacgcaaccgaaccaaccgaaggcaaaaacccagacgaggaggcgcaagaaa

SEQ ID NO: 247243 - RNA, 78 nt, Homo sapiens
cgagcggcaacacggcggcgccggcggcgccccgcgcgggacggcgcagcggcgacacggcccgggggggaggcccga

SEQ ID NO: 247244 - RNA, 81 nt, Homo sapiens
gaccgaaagcaccgcggcgcgccggaaaggccagagcaagaacgaggccaaggaggagggacacagagacagcgaagaaag

SEQ ID NO: 247245 - RNA, 78 nt, Homo sapiens
acccgggcacagcaggcacggaggagaacacccacgaagcaccgccccacgccgagccgccacacaggcaaccgcagg

SEQ ID NO: 247246 - RNA, 87 nt, Homo sapiens
gaccaaagcgccgaggaccggcaacagggcggcggggaaaagagggggggacacacgcaggggccacagagggagccgagcaaggga

SEQ ID NO: 247247 - RNA, 70 nt, Homo sapiens
gggcccggggggacggggggaggcaggaccggaccgcaacagaaaggcagacccggcaccacagggaaaa

SEQ ID NO: 247248 - RNA, 70 nt, Homo sapiens
gaccaccacaaaaaggcggaccaagcccaagcccagggacacacacaagcgggcgcaggaccaccaggcc

SEQ ID NO: 247249 - RNA, 83 nt, Homo sapiens
aggagaacgccaagccaaccgaaaaagccgacaaaaaaaagcaaaagcgcccaggaggaggggccgccgcgccaggagagggg

SEQ ID NO: 247250 - RNA, 77 nt, Homo sapiens
aggaaggcagggacgggaggggaggcaaagggaggaggaggaccggagacggaacggagaaacgagcccgcacaaag

SEQ ID NO: 247251 - RNA, 76 nt, Homo sapiens
agacgacgcccggaagaggcgaaacggagaagagagcggacccacaccagggaagacaggggagagggggcaccag

SEQ ID NO: 247252 - RNA, 72 nt, Homo sapiens
gggcagcacggaggggcaagacacaacaaaggcgcaagcacaaacaagccgaaaaagggaacagcccaggcc

SEQ ID NO: 247253 - RNA, 74 nt, Homo sapiens
agaaggcaggccaaccccacacacaggagcaagcagggggcacccaagcaggaggcaagccaccgcccagcccc

SEQ ID NO: 247254 - RNA, 86 nt, Homo sapiens
gagaagccgagaggccaggcacacaggacaccggaaagaaaggaacaagaggcaagaaaggccccggacaagaaagaaagggcgcc

SEQ ID NO: 247255 - RNA, 34 nt, Homo sapiens
gaggaccgaagagagccccagcagaagccagacc

SEQ ID NO: 247256 - RNA, 90 nt, Homo sapiens
gagggggaagcggcccagggagggcgccccggcaggcggcggccgaggggcccggcacccggcccccaggcggagaagcaccggcgggcc

SEQ ID NO: 247257 - RNA, 75 nt, Homo sapiens
ggaagaccggccagagacccacagcagaccgccaggggaacaacgaaaagaaaaacagaaaagagagcaagaaca

SEQ ID NO: 247258 - RNA, 65 nt, Homo sapiens
cgaaagagagcaaggaaacagcgacagaagccagcacaccaccacaacagaacaggacagagcca

SEQ ID NO: 247259 - RNA, 54 nt, Homo sapiens
acagaaagcaccgcagcgagggcgacaaccccaaccaaaaaggcgccagggacc

SEQ ID NO: 247260 - RNA, 80 nt, Homo sapiens
gggacagcgccacccgagggcgaagcagccaaggagaaaagccccgcaaccgacgggaagaaccgaagaaggccagaaag

SEQ ID NO: 247261 - RNA, 72 nt, Homo sapiens
caagaaccacaacaccgcgagagacaacagcacagacccaacccagcaggcgggaaaaccgccacaaagccc

SEQ ID NO: 247262 - RNA, 82 nt, Homo sapiens
gcgcggaagagccccccgagccacaaacagaccaggaaccagggcgcccagccaggggacaggagcaggaaacgaaagccag

SEQ ID NO: 247263 - RNA, 56 nt, Homo sapiens
gaggccccccagaagcagagcgcggcccgaagcgcagaacacagaaccaccggccc

SEQ ID NO: 247264 - RNA, 36 nt, Homo sapiens
gaaacacagaacgcagggacggggcggacaacaagc

SEQ ID NO: 247265 - RNA, 75 nt, Homo sapiens
cagccggccggcccaccggggccgggaggcgggagacccccagacaggccacccagaaggccggcagagaccgag

SEQ ID NO: 247266 - RNA, 68 nt, Homo sapiens
gcaaagcagacggggacagaaagaaggacccagagcaaaaagagggacaggagccagcggcccagggg

SEQ ID NO: 247267 - RNA, 98 nt, Homo sapiens
cgagccacaagaaggacgcggggaccggggccacgggcaacaaggaaaggaaaccggaaaaggaagaaacgacacagcccggcgggaggaaccgagga

SEQ ID NO: 247268 - RNA, 77 nt, Homo sapiens
gaaacccccccccccacccaccaaaccggagggggaaaaaacccaaggcgcaaaggccgaccgccgcgccacagagc

SEQ ID NO: 247269 - RNA, 73 nt, Homo sapiens
cacccaccaccccccaaaggggagaacaggcacccaaaagcaagcgcgggaagcgacacccagaccccacggg

SEQ ID NO: 247270 - RNA, 83 nt, Homo sapiens
ccggccccagcgggggacgagccgggggaggcgcgggaacgcagggagccaggagaaagaggaagagcaacagccaaggcaag

SEQ ID NO: 247271 - RNA, 67 nt, Homo sapiens
ggaggagcaacggacgaggagcggaggcccccaaaacaaacagaaggcgcgggagaaaagccacccc

SEQ ID NO: 247272 - RNA, 68 nt, Homo sapiens
caaacaggggaaggacacaaaagaaagcgacaaggaacaaggaaaacccagaggaaccaaagccccca

SEQ ID NO: 247273 - RNA, 80 nt, Homo sapiens
gggcacagaagcgggcggcggcgcgccgccccgggcggccgcgggcggccccgccccgccgagcgcagggcggcccgacg

SEQ ID NO: 247274 - RNA, 64 nt, Homo sapiens
acagcgcccgagaccagcgccggacacccccaggaggaccaaaaggagcgcgggccgagccgag

SEQ ID NO: 247275 - RNA, 82 nt, Homo sapiens
cgagcagccgggagacaccgccaccgccagccgaaacacacaagaggagggaagcaccaaacaaaccgaaaaagggaaggag

SEQ ID NO: 247276 - RNA, 82 nt, Homo sapiens
ggcgaagcgggagagccgacgagcgcgcacaacgcaggaccggcgccgaaggcccgccaggcagcccgaagcagcccaggaa

SEQ ID NO: 247277 - RNA, 83 nt, Homo sapiens
cagcaaaggcaaagacgagacaccgccgggaggagggcacagagacgggcggaagaagaggaaaggcagaagagagaacgcca

SEQ ID NO: 247278 - RNA, 58 nt, Homo sapiens
aaagacaagcgagcaaccgcgcccaaacgcaagcaagggcgccggaagcccggaaggc

SEQ ID NO: 247279 - RNA, 92 nt, Homo sapiens
cagagacacccagcagcccccaccacggccggaccgaagggcggcggcggaggggagccagggcgccccagcaggcagaaacacagagaccc

SEQ ID NO: 247280 - RNA, 77 nt, Homo sapiens
aggagacgccccacgaggcccaaaccgccaagacgaagggagggaaggaaggaagagccaaaggacagggagaaggc

SEQ ID NO: 247281 - RNA, 73 nt, Homo sapiens
aaagccggaagaacaaaaaggacagccaaagggaccagccaccggagcggggaacaacagcccgaaccaacag

SEQ ID NO: 247282 - RNA, 83 nt, Homo sapiens
agagaaagacgcgaggggacgaggaagacagggccggcaaccgccagacaggaggaacgaagccgcggaggaccccagagggc

SEQ ID NO: 247283 - RNA, 74 nt, Homo sapiens
agggaaaacagaaaaggggcgagcagaagggagaagaaggaaggagagacgggggaaacccaaaagaggccggc

SEQ ID NO: 247284 - RNA, 80 nt, Homo sapiens
ccaccgccaccggaacccgagaccgagcagaacccgaggcgcggcggcgagggcgccggccgagcccgggaaaacgacag

SEQ ID NO: 247285 - RNA, 73 nt, Homo sapiens
acccgccagcccccagggcgacaccacaagccaagagagaagagcgaccagaggcggcgcccacccaagacgg

SEQ ID NO: 247286 - RNA, 77 nt, Homo sapiens
cccaggaagccagaagcaaagaaaccacgggaagacagcgccagcaaaaggagggccagggagagggggacgggggc

SEQ ID NO: 247287 - RNA, 53 nt, Homo sapiens
cgagcggacggaagaacagccggacagaccgcacaccggcaggacccggaacg

SEQ ID NO: 247288 - RNA, 105 nt, Homo sapiens
agagcccagcgacgggaggggcagcaggggcagcagcggagcggaccccagcccaggcagggcagcagcccagccaaagccggaaaaggacccagagccacgggg

SEQ ID NO: 247289 - RNA, 76 nt, Homo sapiens
gcgagccgcgagagggccggcaggcccgggaagggagacagacccagcacggaccccccccccagccgggcgaggc

SEQ ID NO: 247290 - RNA, 74 nt, Homo sapiens
ccgggccggacggcggccccacagaggccgggcgagcccagggccgacgacgcggcaccgaaagcggagcgggg

SEQ ID NO: 247291 - RNA, 80 nt, Homo sapiens
ccaagcccgcggagcacccgccggccagagaagagaacagcccgccgcccgcagccaaccgccgggacgacggcggggac

SEQ ID NO: 247292 - RNA, 113 nt, Homo sapiens
cccgcaacgcccccggcccgcagcccccgccggccgcccaacaccgaacacccaaggcaccagcagaacagacacccccaaagaccagacacgagggcaaaaagagcggagag

SEQ ID NO: 247293 - RNA, 77 nt, Homo sapiens
gccgggcggaaggacacaaggccggggagcgagcgggcggacaccagaacgaggaaagggaaagccaaccgcacagg

SEQ ID NO: 247294 - RNA, 76 nt, Homo sapiens
ccgaaacgaaggcaacaaacaagggagaggcaacccaaggaccaagaagaccgcaaagccaagaaaaagaagaaag

SEQ ID NO: 247295 - RNA, 85 nt, Homo sapiens
aacaaaacacagaccgcacccccagcagaggcaggaggagcgcaccggagcgagaacccgagcagcgccagagcaacacaccgcg

SEQ ID NO: 247296 - RNA, 76 nt, Homo sapiens
acagccaggaccaggcacccgggaagcccgccggagcggaagagagcgcgcccagcgggcgaccccaccccgagac

SEQ ID NO: 247297 - RNA, 87 nt, Homo sapiens
gcgccgggggccagagaggcggaagaggaggccgaggggcagggacccgggcaggcagcacgaagggagaaggagacccaggagaag

SEQ ID NO: 247298 - RNA, 42 nt, Homo sapiens
aaaaggaagaggacagcaagggggacagaggagccaaaggcc

SEQ ID NO: 247299 - RNA, 76 nt, Homo sapiens
gaacgaacccccccccccggggaggagccccagccccgcgacgaggaggaagcggagcggagcgcgaggcaggacc

SEQ ID NO: 247300 - RNA, 76 nt, Homo sapiens
gcacaccacagcgacaccaagcacggccagaagagagagggagcagggaacccagaccaggccaaagcaaacaaca

SEQ ID NO: 247301 - RNA, 87 nt, Homo sapiens
gagaaggacgagggacaagccaccagacccgcgccgaagcgacccccgggcaggccgggagggcggagcggcgccgcgcgaccaccg

SEQ ID NO: 247302 - RNA, 78 nt, Homo sapiens
gagggacaacagaccacgagggagaccgagggaccggagcggaggaccgggacggggcaagccgggcaaaaaacaagg

SEQ ID NO: 247303 - RNA, 87 nt, Homo sapiens
cacaaaacgcccggggggaagaggaacagccaggggcccacggagcccagcagacccgcggcacgggaggagaggagcgcacggacc

SEQ ID NO: 247304 - RNA, 53 nt, Homo sapiens
agggaggccgagggaacgcccaaagggagagacaaggccccacaccacccccg

SEQ ID NO: 247305 - RNA, 72 nt, Homo sapiens
gaagcaacacgaaggaggccacgcagcaaaccacaggagaggagacacacaggccacccagcgagaaaaaga

SEQ ID NO: 247306 - RNA, 78 nt, Homo sapiens
gacgccggagccgccgccaccgccagcagggggaggaccacgacggacagggccagccaagccgggagggaacgacgc

SEQ ID NO: 247307 - RNA, 52 nt, Homo sapiens
aggcgacgccacccaagacacaaacggcgacacagaagaagagggagagcaa

SEQ ID NO: 247308 - RNA, 78 nt, Homo sapiens
gagggcgaagcacgacacagaaggggaggggagggaaaggcccaggaaaaagcagagagacgcaggaaaaccgcagac

SEQ ID NO: 247309 - RNA, 83 nt, Homo sapiens
cagaaacaaccccaaaaaaggaagggaaccaccagccgcaaacgcggagaggggccacagccaaggacgcaaggagcccaaga

SEQ ID NO: 247310 - RNA, 59 nt, Homo sapiens
ggggaaacacagaacgcaggggaggcgagaagacaaaacccaagcgcacagaaacaaaa

SEQ ID NO: 247311 - RNA, 77 nt, Homo sapiens
ggccgcaccggcgccccacccgcccccgcgggcgccgggccaggacgggaaaacacacgagcgccagaaacacgaga

SEQ ID NO: 247312 - RNA, 82 nt, Homo sapiens
cccagcccgggccccgcgcacagccccagcgcagagaaggagggggcagagcacggcaggcagaaggggccaacccggggga

SEQ ID NO: 247313 - RNA, 78 nt, Homo sapiens
gacaacggaacccgccggagcacccccaccagccggcagcgccgccagacagaagcgaaggggacagggggagaaccg

SEQ ID NO: 247314 - RNA, 72 nt, Homo sapiens
cgagcaagcagaaacgaagagaaggggaagaaagagagaacagggagaccggaaaccgagagaaacgaagac

SEQ ID NO: 247315 - RNA, 64 nt, Homo sapiens
acggccaacaggaagaaaggcgcacccgacccaaaccggagcaacaaaggaaagcgaaagaggc

SEQ ID NO: 247316 - RNA, 79 nt, Homo sapiens
ccaccgacgagcgaagagcaagccggggccaaagcgaccaaccccccaccgcacgcagggggccccccgcccggggcaa

SEQ ID NO: 247317 - RNA, 78 nt, Homo sapiens
gcacgggaccgagaaccaggacagggaggccgcacagaggaggagcaccaaaccgagggagggcagccacaccacaac

SEQ ID NO: 247318 - RNA, 75 nt, Homo sapiens
ccgcgcagcggccggggagaggcaccggagacccgaccaccggaagccacggcccggacccccgccacgcaagac

SEQ ID NO: 247319 - RNA, 75 nt, Homo sapiens
gcgcgacacaggcgagaggcaaccacaccccaaacaaggaaggccagacccgcagcaacccaagaacgaaaaacc

SEQ ID NO: 247320 - RNA, 103 nt, Homo sapiens
gaagccaccccggcaaaggagcgagccggagcgccagcccaccggacacgagacgggcagggacgggggccggaggccaggagagaggcaggaaggcccagaa

SEQ ID NO: 247321 - RNA, 75 nt, Homo sapiens
gccagaaacagccccaaaacagcccagcaccggacaaggaccaaacagccaaggacagacgcccgaaggcccgag

SEQ ID NO: 247322 - RNA, 73 nt, Homo sapiens
aagaagaagacagaacgcccccaccaccgcaaacagacgcagagaacgagaagggacccaaggaagccgacaa

SEQ ID NO: 247323 - RNA, 82 nt, Homo sapiens
caggacgccgagcgggacccccgccgccccgggggccggacgagcaggaacagcacagaagagcaaccagcagaagaaggag

SEQ ID NO: 247324 - RNA, 84 nt, Homo sapiens
ggaccccaaggcacaggcgaccaccccaaaagcaccggccccgcacagcaaaccagggccagagagacccccaaccacacccag

SEQ ID NO: 247325 - RNA, 77 nt, Homo sapiens
gccccccgcccccccaccaagcagggagaagaggagagagcagccaggccccggccgagcccgcccggccagcgacc

SEQ ID NO: 247326 - RNA, 82 nt, Homo sapiens
cgagaaaggccaaagaagccaaagacgcacagaagcacaaaacgccagagacgcgcacgaaacgacgaagaggcccgaggac

SEQ ID NO: 247327 - RNA, 82 nt, Homo sapiens
cccggaggcggacagagaggcaagcgcagggggacggggaccagcagcgcgccgccgcccaggcccccacgccccaggagga

SEQ ID NO: 247328 - RNA, 77 nt, Homo sapiens
gaaaagcaaagaggcaccacgacccggggaagacacaggaagcgccgaggaaggaaaccagcccagaaccgcaaccg

SEQ ID NO: 247329 - RNA, 80 nt, Homo sapiens
acagggccaacagggccggccggccggcccccaaacgcgcccgcccccagggcgggagcagcggaagacaccaaggccag

SEQ ID NO: 247330 - RNA, 46 nt, Homo sapiens
cacgaccgggaccgagacaggcacaccgacgagaccaccagagccg

SEQ ID NO: 247331 - RNA, 76 nt, Homo sapiens
ccagaaagccggaaaccacgggcaaaacagaagcagacgagaacggcagccaaggaacggccagacggagggagag

SEQ ID NO: 247332 - RNA, 81 nt, Homo sapiens
agaccccggcgcgggaacggcccagggccaggcagacaagcccaagacgacaagaggggccagccccaaaaaaggccaaag

SEQ ID NO: 247333 - RNA, 73 nt, Homo sapiens
gacgcgcggggcgggccgccagcggggacaggcagcgaaccgccccagaggaggacaggccccaggacggaaa

SEQ ID NO: 247334 - RNA, 77 nt, Homo sapiens
gagcccaccacaccgcccccagaccgaagaccacgggccggacacccaacagcacgcagacaaggcaccaacagaac

SEQ ID NO: 247335 - RNA, 52 nt, Homo sapiens
gaggggacagaacagcgcccgcccacaaccggcccgggaaaaaaaaggagaa

SEQ ID NO: 247336 - RNA, 69 nt, Homo sapiens
acaggaaggcgccgggcccccccggaacagagcaggacccacacgacacaagggagaccaggaaacgac

SEQ ID NO: 247337 - RNA, 82 nt, Homo sapiens
gcagaccaagaacagacacggagcggccggacaccaccacgaccagcggaggccccgagccgccggcgcacaggaagccgcc

SEQ ID NO: 247338 - RNA, 50 nt, Homo sapiens
gggaccggcaaagaccagaacaccccagaagcaggagaaggaccaagaac

SEQ ID NO: 247339 - RNA, 76 nt, Homo sapiens
cccccgagcggggggacgcgccaggcacagcagcagaagaggcaggaacgaaccaacgcaggaccaggaaaccaag

SEQ ID NO: 247340 - RNA, 90 nt, Homo sapiens
ccgcccgggacggaccaggcgccgcgaccccagacgccgacggcacgaggaagcagccgacacgagcggcaaaaacagcgaaaggagagc

SEQ ID NO: 247341 - RNA, 74 nt, Homo sapiens
cccggagccggagaccccccgaaaccggcacgggacccgaccggaggcaccggcaaggacagacacggcgaccc

SEQ ID NO: 247342 - RNA, 68 nt, Homo sapiens
gccggcgcgccccacgggccaggagggaggacacgcgaccgaacaggaggagccaacccacgagaacg

SEQ ID NO: 247343 - RNA, 54 nt, Homo sapiens
gaaaacgcggaaaaccgacacaacaggcccagaaaacggaaccgcggacccccg

SEQ ID NO: 247344 - RNA, 83 nt, Homo sapiens
ggggggcaccccagcagaaacgggacccgaagcgggaagacccagcgggaggaagaagaggccgccagcagcagagcagccaa

SEQ ID NO: 247345 - RNA, 80 nt, Homo sapiens
gagaaaccggcaagcgcgcaggcgacccccggcagccaggcgcaccaggcagacagagaggcaaccgaccaaacagaaaa

SEQ ID NO: 247346 - RNA, 78 nt, Homo sapiens
agggcccccagagacccggacccccgacgggcaggccccaggccaggccagacgggcgccagggcggaaccaagcagg

SEQ ID NO: 247347 - RNA, 69 nt, Homo sapiens
cgaacccaccccacaaccaggcccaaggcgcacgaaagagccgcagacgcacagcaaccaccggacccg

SEQ ID NO: 247348 - RNA, 75 nt, Homo sapiens
ccccgcagccccccgcagcacccagccggccacggacgagaacccccgcgaaccagaggaacccagcgagcgaga

SEQ ID NO: 247349 - RNA, 77 nt, Homo sapiens
aggcggacaacgcgacgggcccccgccgccgaggcacggacagaagaaacaccgcccagccaagggggagggcagcg

SEQ ID NO: 247350 - RNA, 75 nt, Homo sapiens
cgccggagcagccgaggccccccagccacgccgacagccgcagaacgcggagcccggcacgggcaaacagagcag

SEQ ID NO: 247351 - RNA, 75 nt, Homo sapiens
accaggaaggacaacgaacaggcaaaaaacaaaagaaaaacggaacaggaacaaaagagggagagaaaggcagac

SEQ ID NO: 247352 - RNA, 61 nt, Homo sapiens
ccccgcacccagggggagacgcagcggcaccacaaggcaccgagcgggaacacgagggagg

SEQ ID NO: 247353 - RNA, 111 nt, Homo sapiens
ggaacagaagagaaccagaaaccaaaggagagcagagaacgcacgagcggaagcacaaagccgagcagggagaggaggaagaagcgagaagcaaaggagcacagaacgagg

SEQ ID NO: 247354 - RNA, 76 nt, Homo sapiens
gaaaaagaaacaaaaaaggcagcccagaagggaagaagagagaagcaagcccggcacagagaaaccagaggcaagc

SEQ ID NO: 247355 - RNA, 69 nt, Homo sapiens
acgggcggacgggcgcccagccaggagaaggccaaaaggcaagcccacaggaaaaagcagggccgaacc

SEQ ID NO: 247356 - RNA, 66 nt, Homo sapiens
ggaacgaccgggaaaccggaccaccaaaaaaaccggggacgggaccggaaggacgagaccggggca

SEQ ID NO: 247357 - RNA, 83 nt, Homo sapiens
cacaaaaaacacagaaaagccagaagcacaggccagggcagaggaccaacagggcagagagcaagagcacagccccaggcaca

SEQ ID NO: 247358 - RNA, 77 nt, Homo sapiens
aagccgcaggacagcagccccgagcacgggccgaggcccaccgcgacacaccgccaggaggcagcacggcaggagac

SEQ ID NO: 247359 - RNA, 72 nt, Homo sapiens
acgaggaagagcccgccgaagcaaggacagcagccagaaagcagcgggggacgaagaagaccccaacccaaa

SEQ ID NO: 247360 - RNA, 83 nt, Homo sapiens
agaacaggccaccgggccaacgaaaacgaaacggaggagcccaggaggaagaagaagcagccaaagaagagaaagaagaacga

SEQ ID NO: 247361 - RNA, 57 nt, Homo sapiens
aaaaaccgcacgagccaaccaggagcgcggccacggggaccccacaccacaaaccga

SEQ ID NO: 247362 - RNA, 41 nt, Homo sapiens
cccaggacaaggaagccggcaaggagaggccccggacagga

SEQ ID NO: 247363 - RNA, 70 nt, Homo sapiens
cagcggggggggccccgcgaaggcacggaaaagggacacacgcccacaccacaacaaggaggacaagacg

SEQ ID NO: 247364 - RNA, 74 nt, Homo sapiens
gcgcaccaccacccagggagacagggacagcgacccgcagccccccgggacgggagagcacaggccaaagcccg

SEQ ID NO: 247365 - RNA, 114 nt, Homo sapiens
cacagagggggaaagccaaggaaaaacggagagccacaaaaaaggaagcgaaagagaagccagaggagcagcgcagaagagcaaaacgcgcagcgcgacgaggagagcagaaaa

SEQ ID NO: 247366 - RNA, 74 nt, Homo sapiens
aagcgacagccaggaccaggcacccgggaaggaaagagaagggagggcgacgagagccgaagcagaggccaaga

SEQ ID NO: 247367 - RNA, 79 nt, Homo sapiens
cccgggagcccccaacccacccacagccacccccgcacggccgcggccacggcgaggagcagaggcgcggggccgagag

SEQ ID NO: 247368 - RNA, 75 nt, Homo sapiens
acaaacacagggaggaagggggaaaggagaagcacaaacccaacaggggcgcaacaagagaggggaggagaaaag

SEQ ID NO: 247369 - RNA, 78 nt, Homo sapiens
gcacccgcccagaggccccagcaaagaggacaaaagagcggaggagcggcgagggcaagccaccgagaaagggaggac

SEQ ID NO: 247370 - RNA, 78 nt, Homo sapiens
cggcgccgccagcccggagggaccgccaggggaggcgcggcccgccacgaagaagagcaacggaccacgcccgggagg

SEQ ID NO: 247371 - RNA, 86 nt, Homo sapiens
gcgcgccccgagacccggacagaggcaagcaggggcgccgggggccagagaggcggaagaggaggccgagggccgagacgacgacg

SEQ ID NO: 247372 - RNA, 76 nt, Homo sapiens
gcgagcacagagcccgccgccgaccgccgcccgccacacccgccgccaggaaggagggccccggagcagccacacc

SEQ ID NO: 247373 - RNA, 71 nt, Homo sapiens
aacaaaaaggccagacaagagcaaccaaagacgccaaacgcgaaagggagaaagaagaacgcccggaggcg

SEQ ID NO: 247374 - RNA, 75 nt, Homo sapiens
gaccaccgcgggagcacaagacccagggagaacccaccacgagaggcaaaagccaggaagcgcagaaaaacaagg

SEQ ID NO: 247375 - RNA, 70 nt, Homo sapiens
cccccaagagaccaggccccggaagcagcaggacgaagcacgcagagaagccgagacaaaaaggcaaacc

SEQ ID NO: 247376 - RNA, 58 nt, Homo sapiens
agaacgcgggaggagacagggagccgccaccaaaagcagacggaaaacccacggggaa

SEQ ID NO: 247377 - RNA, 78 nt, Homo sapiens
cgcggccgagacaaaggcaccaggccaccacagaaacaaaagcaacaaagagggacaggaaaacaggaggcagaggaa

SEQ ID NO: 247378 - RNA, 107 nt, Homo sapiens
agaggagccagcggacaacggcccaagacaggcccacccagcccccggagaaacaggcggaacggcgaagcggagaagacccaacacaagcagaaccacacacgggc

SEQ ID NO: 247379 - RNA, 78 nt, Homo sapiens
aagaacgacgaaacggagaaaagggaccaaccgagagcaccaggaagcgcagagagacaccgaacagaacgagagcca

SEQ ID NO: 247380 - RNA, 75 nt, Homo sapiens
ggcgacacgacggcggaacggggaacgacggcccagcaggcggggaagagaaaggacagaaagaaaccaggcacc

SEQ ID NO: 247381 - RNA, 83 nt, Homo sapiens
acacaaggagaacgcacacccccggaaccacccggcagaacgcaacacgccccgagaggaagcggcgcgcccaagccggcccg

SEQ ID NO: 247382 - RNA, 77 nt, Homo sapiens
accggaccagcggccccgcgcgcgcacgacgcagaaaacgcaggacccccgcggacgcgaaggcgaaaaaaggaacg

SEQ ID NO: 247383 - RNA, 82 nt, Homo sapiens
cacggagcaaggaggaaaacacacggaccccggaggaaaagcggaagcggcagcggcgaacgccggaacggaccaacaggag

SEQ ID NO: 247384 - RNA, 74 nt, Homo sapiens
ggccggcgcgccgcgccgcaggccaccgcgcccaggaagccaggagggaagcccagaagacgcacaagagagac

SEQ ID NO: 247385 - RNA, 68 nt, Homo sapiens
gacaaaagggccaaagaagggagagaggggggggaagacaacccggagaacacccaggggacgcccag

SEQ ID NO: 247386 - RNA, 57 nt, Homo sapiens
acaaccaagaaacagaagggaacccgaggaccagggaagacacgggagcgccgccgc

SEQ ID NO: 247387 - RNA, 79 nt, Homo sapiens
gaggagcagcagcagcccagcaggcgcggcccgccagggccagcagaacagagaagaccccggaaagaagaacgaagaa

SEQ ID NO: 247388 - RNA, 75 nt, Homo sapiens
ggggcccggggagccaaagaggcagggcagcaccagagcaaaccaagacccccccccccaccaagaagagggcag

SEQ ID NO: 247389 - RNA, 69 nt, Homo sapiens
ggaggcgggggaccggaggccgcagccaagccggaacaggagcggcgagcccaaacgcaagggggaaga

SEQ ID NO: 247390 - RNA, 55 nt, Homo sapiens
gaagagggaaaccaacggaggaaaagcaagccacccacgcgacgcacacccccac

SEQ ID NO: 247391 - RNA, 81 nt, Homo sapiens
cggaggcggacagagaggcaagcgcagggggacggggaccagcagcgcgccgccgcccaggcacaccagcgaccggaaggc

SEQ ID NO: 247392 - RNA, 81 nt, Homo sapiens
aacccggaaaggcagaagggaaggagcagaacggaggggaacacaaaaagacaagcagaccggaagaccgacggaagacca

SEQ ID NO: 247393 - RNA, 64 nt, Homo sapiens
cgcacaccacagaccaaaggggaaaggaagaaaaggccacaagagaaccaaggaaaagaagacg

SEQ ID NO: 247394 - RNA, 70 nt, Homo sapiens
aggagcgacgccagaaacagccaccagaaggcagacagggacagaaacaccggccagcgcccacaggggg

SEQ ID NO: 247395 - RNA, 79 nt, Homo sapiens
cacagaacccaagaaccagcaacaaacaagacggacacgcaccaagaaggcggagaggaaagagagggaccaccgaaaa

SEQ ID NO: 247396 - RNA, 70 nt, Homo sapiens
gaaaaagcacaagagcaccaacgagggaaggaccaacgaccgcgaaacagacggcagcaggagagaagag

SEQ ID NO: 247397 - RNA, 87 nt, Homo sapiens
agcaccagaaaacaggcggaagaagcgagacagagggccaaggcaacacccgacgaaacggcgaggaaagagaggagccccggaaag

SEQ ID NO: 247398 - RNA, 77 nt, Homo sapiens
aaacgaaagacccgagacacccggaagaccaggcaacaggaagaagaacccacaggggccaacagaggaaggaacaa

SEQ ID NO: 247399 - RNA, 79 nt, Homo sapiens
aggcagcagcggagacgcgggccccgggcgccaagcgggggcacccgaggaggaagagggcagggcccacggaaagaag

SEQ ID NO: 247400 - RNA, 56 nt, Homo sapiens
gagagaggacccccccccccccccaagaacaccgcccagccaagggggagggcagc

SEQ ID NO: 247401 - RNA, 55 nt, Homo sapiens
agggaccggaacggcggcgacaaggggcccgaacagagggagcccaccacgaccc

SEQ ID NO: 247402 - RNA, 77 nt, Homo sapiens
acacccagccaccccaacccgggccacgcgcacaggggcggcagggggaccagccagcaacccgcccccggaccaag

SEQ ID NO: 247403 - RNA, 60 nt, Homo sapiens
caaagccggaagcagaggcgaacgccaccagcgcggcacggaggagacgaagaccaagaa

SEQ ID NO: 247404 - RNA, 76 nt, Homo sapiens
gcagagaaaaccgccaacaagagagaggggagccaaggggcagcagaagaggcgagggaaacaggaaagaaacagc

SEQ ID NO: 247405 - RNA, 60 nt, Homo sapiens
gagcgcacgccaacgacgaggaccgacgcaggaggaaacaccaaggaagccccgccaacg

SEQ ID NO: 247406 - RNA, 71 nt, Homo sapiens
accgcccggggccgcagaaagaggcaccggcacggaccaccccaacaccgggggagaaccgggcccaccag

SEQ ID NO: 247407 - RNA, 79 nt, Homo sapiens
cgacagacgaacgcaagaggcaagccacaggaaaaggccgagacaggcaaccagacggagggaacaaacagggacaagg

SEQ ID NO: 247408 - RNA, 75 nt, Homo sapiens
gcggggccagccggcgagcaaacccaagagcggggccgcaaggccaggcgcgcagaggcacccaacggcacagac

SEQ ID NO: 247409 - RNA, 73 nt, Homo sapiens
cccgggggcacagcaagggggcccaccagagaacacacacgcacaaccggagcagcgaacgggaccagcgggc

SEQ ID NO: 247410 - RNA, 81 nt, Homo sapiens
aaggaagaggcggacggcgggaccacaagacaacgcggagcggcgaagagcaaccaggaggggcacgcccggaagaccaga

SEQ ID NO: 247411 - RNA, 73 nt, Homo sapiens
agacaggcaccaggaagccagggcgaaacaccacacccaggccgacacaagaaggagaaaagggcaaaggaga

SEQ ID NO: 247412 - RNA, 76 nt, Homo sapiens
cagcagagggccgacgggagagcagaaagacgagccgccggggaaaaagcgcagcaaagagacaagccaaagccga

SEQ ID NO: 247413 - RNA, 68 nt, Homo sapiens
gccacggagcgagcggaaggcggcacgggacggcccggcagcaacgaccaaccacaccgggagcgcgc

SEQ ID NO: 247414 - RNA, 103 nt, Homo sapiens
agcccaagagaccccaaggcacaccaaagacccagagccgcgcaacgcgaccagcagcgcccaccaggagcacaaagccacacaaaggaaacgacaaaacccc

SEQ ID NO: 247415 - RNA, 71 nt, Homo sapiens
acagacgacagaaacacgaaaaaccgaccagcaagcgagcacaacaagacaaaggcgaagggaggaagcaa

SEQ ID NO: 247416 - RNA, 74 nt, Homo sapiens
ccgggcccgggcggaggaaaaccccacgaaaggaagcacgcgcgcggacaagaccagaaagaaaagaaccaagg

SEQ ID NO: 247417 - RNA, 85 nt, Homo sapiens
cgagagaaacccagacagaggggagcacagagaaagagaagagaagagaaaggcccggagacgacgcccacccaggaggaggcaa

SEQ ID NO: 247418 - RNA, 79 nt, Homo sapiens
ccgcacgggcggccggccggccaggaggcgaggggccggcgagcagagagaccgcaccacccggaggagccgccggcca

SEQ ID NO: 247419 - RNA, 55 nt, Homo sapiens
acaccggggacagacagggggaaaaagaaaagggcgaagacccgaagcagcgcag

SEQ ID NO: 247420 - RNA, 82 nt, Homo sapiens
gagaacgaaaaaaagagaaaccggggaaccacggacaacccagaggacaacgaaggcgcagccgaggaagaagaaggcagca

SEQ ID NO: 247421 - RNA, 79 nt, Homo sapiens
cacgggaccgaaacaggccggggcacagcacagcgccggcgcaaggaagaagacggcacgggacccccagcacaggcag

SEQ ID NO: 247422 - RNA, 64 nt, Homo sapiens
ggaacaagaggggacagaaagggaagcgaagggccgaagacgaaaaaagaaaagccgcccaccg

SEQ ID NO: 247423 - RNA, 69 nt, Homo sapiens
ggagcaggagaaggagaccccgggagaaccaggaccagcggccaagaccacccaggaaaccacgacaag

SEQ ID NO: 247424 - RNA, 76 nt, Homo sapiens
ccgcccgggccagcggccgcgcacccccggccggaggcaccagccaagaggagccaggagcacggggggaacaaga

SEQ ID NO: 247425 - RNA, 55 nt, Homo sapiens
gaaaaccccgccaggacagaacccccgcccccgaaggccacagaaccgcagaccc

SEQ ID NO: 247426 - RNA, 84 nt, Homo sapiens
agccggagacgagaccagaggccgaaccgggcgacaagaggccgggcgccccgcaggacacaaggggagaaaccagaagaagac

SEQ ID NO: 247427 - RNA, 71 nt, Homo sapiens
agacacgggaccacccagggcaaaccccgccagaggcacacacggagcagccgcaacagcgcaccgacaca

SEQ ID NO: 247428 - RNA, 71 nt, Homo sapiens
aaggaccaagaaccagacagccccagcacagaggaaagagaaagagccagcaagaggaagcggccggagga

SEQ ID NO: 247429 - RNA, 46 nt, Homo sapiens
acaggaggcagcagacggacaccaggaggaggaagccaagaacggg

SEQ ID NO: 247430 - RNA, 105 nt, Homo sapiens
caggagcgaccggaggacaggcgccgcgacggcgcgagcgggaggcgggaggcggcagaagcagccagaggagggcacaggcggcgcggagcgcgccgagggcag

SEQ ID NO: 247431 - RNA, 77 nt, Homo sapiens
cgggcgaagcgacgagccgcgaggagcagaaaaaggcagccgagcagaacgaagagggaagaacagcggcaggggac

SEQ ID NO: 247432 - RNA, 46 nt, Homo sapiens
aggaggggcaggcccggcgaacacagccgaggaagaacaaaccaaa

SEQ ID NO: 247433 - RNA, 71 nt, Homo sapiens
cgcgggggcgaggcggagcagaacgaaacaagaaggcccaaacaggccaacacaggaagggagcaagagga

SEQ ID NO: 247434 - RNA, 66 nt, Homo sapiens
gaagaacccacagaggaagaccgcaggaaagcaggaaggcaagaaagccaaggacgaaacccacac

SEQ ID NO: 247435 - RNA, 71 nt, Homo sapiens
agccacgacgggccgagccgccacaccaaaagaaggggagcccagaagcgagaggaaaaggcaaacgacgc

SEQ ID NO: 247436 - RNA, 69 nt, Homo sapiens
gcgaacgcccccccgacggagaacaagagcgccagacgagcacccgagggacccgaggagcccaccaag

SEQ ID NO: 247437 - RNA, 70 nt, Homo sapiens
ggcaccaaaggccaccggaggccccaaagaacccgcgagacacaaccacagacggagaggccgcccacgg

SEQ ID NO: 247438 - RNA, 55 nt, Homo sapiens
gacgggcggagaggagaagcccagcccaagccaaagccgggacacccccaggaca

SEQ ID NO: 247439 - RNA, 70 nt, Homo sapiens
ccacagccaggagccccagaacggcaaacgggaaaggcaggggacaccgaacggaacggaaacacagcag

SEQ ID NO: 247440 - RNA, 68 nt, Homo sapiens
aagacgcagaaccacgagcaccaaggaagacagcacgaaggcccaaaccacgacgaccgaaaacccag

SEQ ID NO: 247441 - RNA, 68 nt, Homo sapiens
aaaaacgaaaccggagcaacccacgacccaacaccacaggggcacgagggagaggccgagaagaaaca

SEQ ID NO: 247442 - RNA, 78 nt, Homo sapiens
cccggaacaacaggacacgccgcgccaggagcgccgcgcccaaagaacaggggaccaaagccaacccagccaggcaac

SEQ ID NO: 247443 - RNA, 66 nt, Homo sapiens
ccgggcgggggcgcgccccgcgcgcagggaccgcccgaccagggagcggaagaaacccagacgccg

SEQ ID NO: 247444 - RNA, 82 nt, Homo sapiens
accgcgagcgaggccggaaccaggcggagaaccggcggcgcacgagcgcggcggggaccaagagaagagcagaggaccagca

SEQ ID NO: 247445 - RNA, 74 nt, Homo sapiens
aaaaaaaagaagagacagaagcaggggaaccaacagaagggaagacgaaaccccgaagaaaagcaacgaaaaga

SEQ ID NO: 247446 - RNA, 81 nt, Homo sapiens
ggggcaccgagcgggaacgcacggggcgcgccgggcggagcaggcgacacagccccaacgcggaccgagaaacggacacca

SEQ ID NO: 247447 - RNA, 81 nt, Homo sapiens
agacacagaccccaaggggggccaggggaaggccgggaagaccgaggaagggcagaacccccggagcgcccgcggggaaaa

SEQ ID NO: 247448 - RNA, 83 nt, Homo sapiens
ccagcccgagacgagaaccccacacaagagcccggcgaacaggccaagaaaggagcgagggacggcggcgaggaccagcagcc

SEQ ID NO: 247449 - RNA, 89 nt, Homo sapiens
cgggccccccccaggaacggcccggggccgacccggcccgaggggaagcagccaggcggcccggcagcaaggcgagaagaaagaggcca

SEQ ID NO: 247450 - RNA, 40 nt, Homo sapiens
agggcagcggcaaacgcaggccaggagcccccacccaaag

SEQ ID NO: 247451 - RNA, 62 nt, Homo sapiens
agccacaccaggggagcccggggacccccacccccaccccaggcccaggggacgggaacccc

SEQ ID NO: 247452 - RNA, 75 nt, Homo sapiens
ggacaagccgcccccgcaggaccacgcaccccaacccacaggacacgcccaagcaagggagccaccaccagaaga

SEQ ID NO: 247453 - RNA, 81 nt, Homo sapiens
acaaccagagggaagaaaagcaaacgaaaccgggaaacaggcaggcgggcacagaacgccccccaccccaccacaaggagc

SEQ ID NO: 247454 - RNA, 57 nt, Homo sapiens
aaaaacacccacgggggaaccaccgaaggcaagagagaaaccgaagaaggcccacac

SEQ ID NO: 247455 - RNA, 72 nt, Homo sapiens
gaaaggcaccagacaagaggaacgcggccgcagcgccgcccccaccgaccccggcccgcgccgggggccccc

SEQ ID NO: 247456 - RNA, 63 nt, Homo sapiens
caagcaagagccaggacccccgaaagccagacagcaaagcccagacaagccagggaacgaagg

SEQ ID NO: 247457 - RNA, 78 nt, Homo sapiens
agggccggggacaccagggaaggggcacgaagaccaaccggccaaagaagagaacccagaaagacacacagcgaaaag

SEQ ID NO: 247458 - RNA, 74 nt, Homo sapiens
cgcagccggggacaccaaacagcgggccaaaagcagagaaccaaagaacacggccaggacaagaccagagaagg

SEQ ID NO: 247459 - RNA, 76 nt, Homo sapiens
gcccgcggaggagcgcccggcccgagaacacgaaacaaggaagaaagaagcaagaaaaacagaccgggggaaaaag

SEQ ID NO: 247460 - RNA, 87 nt, Homo sapiens
gcgcccggacgggggcccacggaggcagaggggaggaggaccggagcgacagcgcgcaccacccgcaggcggacgcacagaacagcc

SEQ ID NO: 247461 - RNA, 76 nt, Homo sapiens
agcagggaagcaaaggccaggcagaaagcggacgacacggacgcccgcccccaaaagcaaccccacagaccaaaaa

SEQ ID NO: 247462 - RNA, 60 nt, Homo sapiens
ggagcggaggcgcggcgccgggagcgaggccgcaggaggccaggccccagaccgcgggga

SEQ ID NO: 247463 - RNA, 79 nt, Homo sapiens
cggcaaggagagacgcgcgaggggcgccgaagcgagggagccggcgccgggacagcagccgaagcagcgggccggccac

SEQ ID NO: 247464 - RNA, 66 nt, Homo sapiens
ccacccgacccggcaccacacgcagaacgggcggacgggcgcccagccaggggaggcaagcagggg

SEQ ID NO: 247465 - RNA, 77 nt, Homo sapiens
cggaccggccgagaggaagacgagccgggaggaacggcccggaaacaggaggacgacccgcgccgggacccgggcga

SEQ ID NO: 247466 - RNA, 69 nt, Homo sapiens
agggggcaccgagcaacgagggcaggggaccccgaagcaggaggcccaaggaacagcacagcagcgaca

SEQ ID NO: 247467 - RNA, 82 nt, Homo sapiens
ggggaggccgggaggacgaaggagggggaagacagagaagaccacacaaccgaaggggccgggcaggacggcccggggcagc

SEQ ID NO: 247468 - RNA, 89 nt, Homo sapiens
ggagggcagccacccccgcggacagcgccgacgccggggcacggccacgcacggccacccagaggagaaggccaccccgccggaggcac

SEQ ID NO: 247469 - RNA, 77 nt, Homo sapiens
aaaaagaaaccagcagaagaaaagacaaacaaaaaccaacgaagcagcgacagaggcgcgaaaaagacaagcgaccg

SEQ ID NO: 247470 - RNA, 67 nt, Homo sapiens
cggacggcgcacgacgagacggcagcgcacgggacaaggaaaaaccaagcggagaggagcagccaac

SEQ ID NO: 247471 - RNA, 53 nt, Homo sapiens
agccagccacaggcggcggaacggaacagaagcaagaccaacaagccacccac

SEQ ID NO: 247472 - RNA, 78 nt, Homo sapiens
agaaggccgagggccgggagcccgcaccgggccggcaggagcccccaggacaggcacacccgggaaaaccgaacaccc

SEQ ID NO: 247473 - RNA, 101 nt, Homo sapiens
ccccgcgcacccgagaaaacgaggccccgagccagccccgacagcgggaaccgacggcacgggaaacacgagaccggcgcagcagagcagaaacaacaccg

SEQ ID NO: 247474 - RNA, 42 nt, Homo sapiens
cgcaaacagggaaacaggacgagagaggagcgcgggccgaga

SEQ ID NO: 247475 - RNA, 80 nt, Homo sapiens
gcgcggccgccgcgggggcgcggccgcgggcgagccaaaaacggcgaacgcaagcagacggaagaagacgaagaaaaccc

SEQ ID NO: 247476 - RNA, 71 nt, Homo sapiens
cacacaaggcaaaagaaccaagccgagagcacggggacacaaagggcaggaagagccgcgggcagggaaag

SEQ ID NO: 247477 - RNA, 75 nt, Homo sapiens
gggaagggaaccggaaaagacaagccccaacagccacagccacacacagcccacaggaacgggggccacccacaa

SEQ ID NO: 247478 - RNA, 78 nt, Homo sapiens
ggccgagcaggcgagcgaacgacggcgaaccgggagaccgcccccgccggcgcggggccaggccgccaggcgaccaac

SEQ ID NO: 247479 - RNA, 61 nt, Homo sapiens
ccggcgccggaaaggcagccaaagagacccacggcagggggaggccgggcgggggcagccc

SEQ ID NO: 247480 - RNA, 81 nt, Homo sapiens
ggagcgccgccgccgggaccccgcccagcagccaaacaacccaaggcagcggagccccccagcccccgcagacggcgaggg

SEQ ID NO: 247481 - RNA, 111 nt, Homo sapiens
ccgggaaaggcccggggggagggggcccggagcggcaggcacaaccggggaagggccgcagggaccggagagcaaggggacccgcacacgcaacccgccccagggcaaggg

SEQ ID NO: 247482 - RNA, 71 nt, Homo sapiens
gagccggcggcggacggcagagacaaacccgagagcaaaacaaccagccggaaccggacagcacaagcccc

SEQ ID NO: 247483 - RNA, 60 nt, Homo sapiens
cgcccacgaccaaacacagggaagagccgcaggaggagaaccaaacgcgcgcaaagaagc

SEQ ID NO: 247484 - RNA, 81 nt, Homo sapiens
ccaacacaaaaaaaaccaacagccccccaggccgggaggcccagcccccgcgcggccggaggccggagccccgagcaggca

SEQ ID NO: 247485 - RNA, 80 nt, Homo sapiens
cgaagagaggacgggagggcaacgagcacaacaggagcacgaggaggggcgcggaggcaggagaaacggcaagagaccgc

SEQ ID NO: 247486 - RNA, 81 nt, Homo sapiens
ccacacccaccaacaacaccacaaaaccacagccaaggaccaaaggacccaggagaggaaacagccccgcaggccacagag

SEQ ID NO: 247487 - RNA, 57 nt, Homo sapiens
ggggacccccagagaagacggcaaggacacaaaaaaacagccaggacccaaacaaaa

SEQ ID NO: 247488 - RNA, 68 nt, Homo sapiens
aaccaagagaaacaaccagggcacagacgcaaaccaccaaccggagacaagaaaaaaaacagaggcgc

SEQ ID NO: 247489 - RNA, 86 nt, Homo sapiens
cggcgccgccaaacagcccagccgcgccagcgcccggcgccgcgcgccacccccgacagaccgaaaagggcggaaaaggaccaagg

SEQ ID NO: 247490 - RNA, 57 nt, Homo sapiens
gaggaggccggggaccagggcccaggacaaggcccgagaacaaggacacaccccagc

SEQ ID NO: 247491 - RNA, 51 nt, Homo sapiens
gagaaacgcgaaaaggaagcggaagggaaagagaaaggagaccacaagacc

SEQ ID NO: 247492 - RNA, 72 nt, Homo sapiens
gagagagccaaacccccagcaacaaaccagccgccgaaggagaaacaaggaaaccacagccaacccgcagaa

SEQ ID NO: 247493 - RNA, 53 nt, Homo sapiens
gggcccgacgcagcgccccgcaggcccggggagaccagggcgaaggaagaaca

SEQ ID NO: 247494 - RNA, 81 nt, Homo sapiens
aaagaaccagaaaaagagaaggaggcgcgaggaacgcaaaacacagccgggcggaaggccaggggggcggaggccgggccg

SEQ ID NO: 247495 - RNA, 75 nt, Homo sapiens
acaaagggaaccaggaaaagagagcaaaagggacggacagccaacacgagacaaagccagggaaaacaaaaccac

SEQ ID NO: 247496 - RNA, 84 nt, Homo sapiens
gcggccgcgccccagggcgcggggacgccacgagagaagaaagaaaaagaaaccgccagcccagagacacgaaagggacagaga

SEQ ID NO: 247497 - RNA, 119 nt, Homo sapiens
ccgccacccggcgcgaccgcccggcaccgggagaaccaccgccaccgccaccagggggacccgacgaccagggggagagacccgcgcccccccgagcccagggcacggccaacaccagc

SEQ ID NO: 247498 - RNA, 73 nt, Homo sapiens
cacaaaaaggaagcagggacgaacaaaacagcggaaaagggcacagaccaggcaacgaaagcaaaccgagagc

SEQ ID NO: 247499 - RNA, 79 nt, Homo sapiens
cccgaacgcaagccgggagcgcggagcccggcagggggaggagaagaggggaggaaccaaggaaggccaacagaggaga

SEQ ID NO: 247500 - RNA, 77 nt, Homo sapiens
ggagaaaaggagagaaacacggagacagcaccaaacccacagaggcacgagagccgcagccacagcaaaccggcaac

SEQ ID NO: 247501 - RNA, 113 nt, Homo sapiens
ggacgagcggagaaggccacaccacgcagaacgcaacaccaaggcacaccaccccagcaaaggagagccagagcgaacccaagacggggcacgccgggagaaacaagcacgga

SEQ ID NO: 247502 - RNA, 72 nt, Homo sapiens
ccggaaaccaacaagacacacagcaacgaagcaggggaggagggaagaccggacagcgagccaagagagaag

SEQ ID NO: 247503 - RNA, 75 nt, Homo sapiens
agaccggaaaaacggcccccagagcaggagcaggaaaaaaacagacgggaaaaacaagccgaaccaggagagacc

SEQ ID NO: 247504 - RNA, 35 nt, Homo sapiens
ccagagagcgggaccacagccaaagacaccgaaac

SEQ ID NO: 247505 - RNA, 67 nt, Homo sapiens
gggaccccgcaacccgaagccacagcccaacccccggcacccgacaccagaccaacaggagcagacg

SEQ ID NO: 247506 - RNA, 57 nt, Homo sapiens
cccaccccagagagcgcagcaaggaacgagggaaaccgccccacccggagggccccc

SEQ ID NO: 247507 - RNA, 74 nt, Homo sapiens
aagacaagcccgcgggaaccaacagcaccacagagcaagaagagggaaggcaccaggagaaggcaccgggaaac

SEQ ID NO: 247508 - RNA, 80 nt, Homo sapiens
ggccagcggcaagcgcccgggcaccggaccgacgggcacaagccaggaggagcccggaaggccccccaggccgccgagac

SEQ ID NO: 247509 - RNA, 83 nt, Homo sapiens
aacccacagccacggagaaaaagaagaaaagaaaaagaacagaacaaggacaacgccaaaccaaggggaaaacagcagaacac

SEQ ID NO: 247510 - RNA, 70 nt, Homo sapiens
caaaaagccagagaagccgccgaagaccacaagggcagaagacagcaggcccgcacccaaccagccaaag

SEQ ID NO: 247511 - RNA, 71 nt, Homo sapiens
gagcccgaccgggagaggacaagaccacgagccaggccggagcccacccagcaacaccagagaaagggcca

SEQ ID NO: 247512 - RNA, 63 nt, Homo sapiens
gcgaggcacacccagggccggcggaccagcgagccggaaaccggaaccaaaaagaagccccag

SEQ ID NO: 247513 - RNA, 78 nt, Homo sapiens
cgacggggaggcgcggccaacggggccacaagggaagaaaacgccagagaagcagagcagcccggagcgaggggagac

SEQ ID NO: 247514 - RNA, 60 nt, Homo sapiens
aacccaaccccaaaaagcgaacaagagaggccgccagacaccaggacagccaggagaccc

SEQ ID NO: 247515 - RNA, 73 nt, Homo sapiens
cccaaccgccgcggagaccacagcgccacccgccggcaccaccccagaggcaccacgaagaccccgcccagcc

SEQ ID NO: 247516 - RNA, 36 nt, Homo sapiens
gccggaagaaaaggccgaaacgaaaagagacagcag

SEQ ID NO: 247517 - RNA, 77 nt, Homo sapiens
aggcaggggccaggaccggacgccgcagaaaacacaaacgaagaaagagcaagacacgggaacccaagaaaaagcga

SEQ ID NO: 247518 - RNA, 79 nt, Homo sapiens
ccagggaggccaagcgaccacccaaagaaggcaagaaggaccagaacgcgagcgacaagggaggaaacacaaaagcgaa

SEQ ID NO: 247519 - RNA, 75 nt, Homo sapiens
acagacgggggcgagcggacccgcagccccaaaggccgcaacgggagcgcccgccaagaggagggcaaaagaaac

SEQ ID NO: 247520 - RNA, 72 nt, Homo sapiens
cccaccagcagcgccagaggcaccggccgaggcaaacacccagcagagaacgacaagacagcccccgaccca

SEQ ID NO: 247521 - RNA, 82 nt, Homo sapiens
aaaaagcaacggacaaaccggcagagacggaacgacaagagagagggaccaagagacacgagaaaagagcgacgcaaaaccc

SEQ ID NO: 247522 - RNA, 60 nt, Homo sapiens
cgagagcggaccgagagcgcgaaacgcacgagaagggcgacaggacaacggacagcaaaa

SEQ ID NO: 247523 - RNA, 74 nt, Homo sapiens
cagccacgaccaggacaggaaagacaaaaagggagagggaccgaaggagggcgcccacgggccgcgggcccgcc

SEQ ID NO: 247524 - RNA, 79 nt, Homo sapiens
gaccacggcgcggagcgccgccagaggagaagaccggcacccacccagagcccgagacagaagggcacagagcgacccg

SEQ ID NO: 247525 - RNA, 74 nt, Homo sapiens
cgcacacagagcacccgaggcaccggcagggcacaaggaaaacgaggaagacgagaaaacacgcagacgaaccc

SEQ ID NO: 247526 - RNA, 76 nt, Homo sapiens
cgcagcggagcaaggaaaggaggcagaaaccaacacaagccaacccacaagcggcagacaagccgagaccaccagg

SEQ ID NO: 247527 - RNA, 72 nt, Homo sapiens
cccgcaaggccggcgcggaggaggggagcagcgcgcaaggggccgccccccgggacgaccggaggccaaccc

SEQ ID NO: 247528 - RNA, 74 nt, Homo sapiens
gcgagcagcggacgccggccgccgcaggaggacccagaagaccccagacggggagcgcagcagagggagcgccg

SEQ ID NO: 247529 - RNA, 54 nt, Homo sapiens
gcaacccagcgcaggagggcacggaggaccaagaacggcagcagagcggcagca

SEQ ID NO: 247530 - RNA, 80 nt, Homo sapiens
cggaccccccaacaccccacgaaggcggcaccaagcacaggagcgcccagcagccccaaggaggacgcagcaccgaagac

SEQ ID NO: 247531 - RNA, 72 nt, Homo sapiens
caccgaggaaagacaacccacccgcgggaacccgccgccaggcaccaggaagaagaggcggaagaaacaaca

SEQ ID NO: 247532 - RNA, 73 nt, Homo sapiens
gacgggcaggcggaagcgccagaggagccaccagagagaacccaccgcaagagaccaaaggccaagagcaccg

SEQ ID NO: 247533 - RNA, 56 nt, Homo sapiens
caggcaaggaccgaaaggcaacaaagaaggagcgaaggacgggagggcggccaggg

SEQ ID NO: 247534 - RNA, 74 nt, Homo sapiens
agaagacggcaccaagacagaaggcaccaaacggacagaagcaacaaacacaacccagaaacccagacaagggg

SEQ ID NO: 247535 - RNA, 80 nt, Homo sapiens
ccccggcgcacgcggcgcgcacagacccagacccagccgcgaagccggaggccaaggagcggagaggccccccagcgcgc

SEQ ID NO: 247536 - RNA, 78 nt, Homo sapiens
gcagacgcagcggaagacagcagccccgcggccagggacaggcacagcgccgcccaccagagggacgccagccgccca

SEQ ID NO: 247537 - RNA, 91 nt, Homo sapiens
cgcgcccccgagcgggccgccggggcgcgcgagacggagaagggcgagggacgcagacaggagccaccccaaggagaagcagccaggacag

SEQ ID NO: 247538 - RNA, 66 nt, Homo sapiens
cgcgcgcaaggaagaaacccccagccgacgcccgcgccccccagcaaggcccccgggaaaccgaag

SEQ ID NO: 247539 - RNA, 72 nt, Homo sapiens
gggaagccacggaccgccccaccccagggacggaaggcggccccgccgccccggggacagcggaaacaggcc

SEQ ID NO: 247540 - RNA, 71 nt, Homo sapiens
caacaggagcacaagagaccacagacacaagcgggaggaagaaggaggaccaccggaccccgccgagcgag

SEQ ID NO: 247541 - RNA, 59 nt, Homo sapiens
agacggcacgcaggagaagggccaggcacaaagagggcgggacacccaggaggagggcg

SEQ ID NO: 247542 - RNA, 72 nt, Homo sapiens
aaccaggaggagaccccacgccggacccaaggcgggaaccggggacccaggaaggggaaaaagagagaaagc

SEQ ID NO: 247543 - RNA, 78 nt, Homo sapiens
ccgccggacccccggaccccccgaccccccggcacaaagcagaccgccccacgggcgcgcccgcgacagcaccccgga

SEQ ID NO: 247544 - RNA, 83 nt, Homo sapiens
ccgagagcggaccgagagcgcgaaacgcacgagaagggaaggggccaccagaaggaggacgcagaagaccacaacagggacac

SEQ ID NO: 247545 - RNA, 85 nt, Homo sapiens
acccacgcagagggcggagcggcagggagacgacgaggaggaccgggagacgagagccaggccaagcgccaagaccgaggagggg

SEQ ID NO: 247546 - RNA, 80 nt, Homo sapiens
cccggccgccggcgcgggagggcccaagaggagaagacggcggcggcgagggggggcggacggaaaccagaacgaaaacc

SEQ ID NO: 247547 - RNA, 72 nt, Homo sapiens
caggggcgcaggagggcgaccgacaaagaagcgcgccccccgggagaaccccagcggcagcaccaaggcgga

SEQ ID NO: 247548 - RNA, 87 nt, Homo sapiens
gcacaagcccaggagaaacaacaagaggaacacggagacaggcggcgacggcggcgcgaggaccgaccgggcccgcggacgaagaag

SEQ ID NO: 247549 - RNA, 67 nt, Homo sapiens
cgaggaacagagaaaagaaaccagcagacagaagcaggaaaccggacaagcagaagaacagaggagc

SEQ ID NO: 247550 - RNA, 56 nt, Homo sapiens
aacgccccacgaccaggggcgcgggcaggacaccgccgcccgggacccggcgcagg

SEQ ID NO: 247551 - RNA, 79 nt, Homo sapiens
cgccccagcagcccaagagaaccaaggaaggagaagagggcggagaaggaacagggagagaaacaacgggaacagaaag

SEQ ID NO: 247552 - RNA, 74 nt, Homo sapiens
ccgcagggggcaggaggacaagccagcaggccggagcgcggcggagcaggccggggcccccacccagccacgag

SEQ ID NO: 247553 - RNA, 76 nt, Homo sapiens
gggagaaggaagcacggaacccgcagggcaagacaaagaaacagccggaaaagcacgagcacaagacgaaaacgac

SEQ ID NO: 247554 - RNA, 79 nt, Homo sapiens
cacagaggaacagggcaaacccgacccggcggcagaggcggccccagcggccgcacaggaagaaacgccaggaacacaa

SEQ ID NO: 247555 - RNA, 35 nt, Homo sapiens
ggagcgggagagggccagcaggaccaaggccgagc

SEQ ID NO: 247556 - RNA, 68 nt, Homo sapiens
cacggaggcacagcggccccccaaaaccaaaaccacacaaggaacggaaaacagccccaaagcagcag

SEQ ID NO: 247557 - RNA, 54 nt, Homo sapiens
aaggggaaccccggagaaaaggccaagaaggcagaggcccacgcggaccggcag

SEQ ID NO: 247558 - RNA, 79 nt, Homo sapiens
cccgcagcgcgggcacccacgaccgagcaagccgccacggcccccggaccagcccgggaacgagaggagcaacagagac

SEQ ID NO: 247559 - RNA, 62 nt, Homo sapiens
gagcagcagcagcagagagaaacagcaggacaaacaggcacaacaaaaccaccagcagaagc

SEQ ID NO: 247560 - RNA, 57 nt, Homo sapiens
cgcgcacggagcagaaaacaaggaggaggcgaggaaagaagaaaagcgagggcgacg

SEQ ID NO: 247561 - RNA, 77 nt, Homo sapiens
ggaacagagagggacccaaacaaagaaagccgacacagaacacaagagaggaccacacccacgggcaaaggacagga

SEQ ID NO: 247562 - RNA, 75 nt, Homo sapiens
gaccaaagaccggagagcaccgcaaacacagacaaaaggagagacgccagaagcaaggcgacgccaggagcacac

SEQ ID NO: 247563 - RNA, 68 nt, Homo sapiens
gcagacaccggccacccagagagcaaaaggcagcgaaacacgagacacagccagcgcgccagaaaccg

SEQ ID NO: 247564 - RNA, 69 nt, Homo sapiens
ccaaaaaggcacgagggaacgggaaagaacagagaagaaccaggacgcgagaaaggcgaggaaaagaag

SEQ ID NO: 247565 - RNA, 70 nt, Homo sapiens
ccgcgcccggacagggaggcacaagacgccacccagagcagccgaacgccaaagaaaccagcaggcggca

SEQ ID NO: 247566 - RNA, 77 nt, Homo sapiens
ggccaaggcggccaagcacaacggcggcacccacgcagacaccagccgcgccagcacccaccaaggcccggaggccc

SEQ ID NO: 247567 - RNA, 59 nt, Homo sapiens
cggacacagcaagagacacggcccccgcacggcaagccgggaccgggccagagagcagc

SEQ ID NO: 247568 - RNA, 69 nt, Homo sapiens
cggaaaccggaggcaggaaacgcagcaaagccacgggggagaagcaaggcgccaccggaagaaacggga

SEQ ID NO: 247569 - RNA, 70 nt, Homo sapiens
cgagagacaccaagcggccagcaaacagggaccagcacggcaggggccacacagagcccacgcaaagagg

SEQ ID NO: 247570 - RNA, 76 nt, Homo sapiens
gccgcccgagcacgccgcgcagcccggccgccggcccccaacagcgccgcccgagaaaagcacagcacccgcaggc

SEQ ID NO: 247571 - RNA, 74 nt, Homo sapiens
cagagcagaggacgcgcaggggcacccccacggagcccggaagaggacacagcgcgaccaccgccacgcagcgg

SEQ ID NO: 247572 - RNA, 79 nt, Homo sapiens
ggcacgaggaggggccgcgggcgaccaaccaggagcgacagggacccgaagcccgcagaagaggccaaaggcgacagga

SEQ ID NO: 247573 - RNA, 77 nt, Homo sapiens
aaaaacaggagaagcagaacccagcgaaggacgcccagacaggcagaaacgccaaccgcgccaacccgaggaccaga

SEQ ID NO: 247574 - RNA, 83 nt, Homo sapiens
cgggccccgcgaccggggcccggggaaggcccgccgcccgccccagaaacgaaggaggcccaaccacaaaaggagccgacgga

SEQ ID NO: 247575 - RNA, 85 nt, Homo sapiens
cccgcccggaaggcaagcgcagcaacaacagagagcacggcccacaccccagaccacgccgccaggaggcaacacgggccccccc

SEQ ID NO: 247576 - RNA, 81 nt, Homo sapiens
cagagcggccacaaaacgaagacggagccaaaccaagaaagcccacggaggggccacacaaaacaaacgaagagacggaga

SEQ ID NO: 247577 - RNA, 67 nt, Homo sapiens
aagcagcgaagcagggaggaagaggcaaccaggcccaaagaaggaagcggccagccccagggcagca

SEQ ID NO: 247578 - RNA, 54 nt, Homo sapiens
gacccaagagccagaaagaagcccaccaagaaaacacagggagcgcaacagaga

SEQ ID NO: 247579 - RNA, 80 nt, Homo sapiens
aacacgaccagcccaggcacccaaagggcccaggaccccacgcccaggggggagcgcgacagcaggcgcagccacgaagc

SEQ ID NO: 247580 - RNA, 70 nt, Homo sapiens
ccacacccgcacggccgcacccaggaaccgaaacaagagaaaagcaagaggccaaagaagacagagaacg

SEQ ID NO: 247581 - RNA, 85 nt, Homo sapiens
aaggaagcaagaggcaccgcgcgcacagaggacacagcacaccccgagccgcacccagcgaacagcagccccagccccagcacag

SEQ ID NO: 247582 - RNA, 84 nt, Homo sapiens
gaagaagaacccacaggggccaacagaggaagcgggggcggccgcacccaggggacgagaccggcgcggcgcagcgcggggagg

SEQ ID NO: 247583 - RNA, 84 nt, Homo sapiens
ccagcagaacaacagcgaggaagaagaggacgacgacgacgaggaagaggaggcgagggaggagcgcacgacgggaacccacga

SEQ ID NO: 247584 - RNA, 75 nt, Homo sapiens
gcagcggcgcagcccgggcaaccagccaagggaccgcagggagacggcaccaccaccggggggccagcacggaaa

SEQ ID NO: 247585 - RNA, 59 nt, Homo sapiens
agacaagccccaaggagcccggccccacaccggcacacagcggagaggacgcagacgga

SEQ ID NO: 247586 - RNA, 76 nt, Homo sapiens
ccccgagagcggacacagccaccaggcaggcaaccagcgggaccagaggagaccggagccaccaaaaacgaagagg

SEQ ID NO: 247587 - RNA, 41 nt, Homo sapiens
ggggggcaaacccgagagaacggagcccagaaaccaggcgc

SEQ ID NO: 247588 - RNA, 84 nt, Homo sapiens
aaggacaacgaaaagacaaggacccacccacgaggaccgccggaaaggcagagcgacagccgaaccccagcggagaggcccgac

SEQ ID NO: 247589 - RNA, 76 nt, Homo sapiens
gggggggcagcgcacggaggagcggcgggccagacagcgaaccagaagaaagacacgagcaacgggccaggggacg

SEQ ID NO: 247590 - RNA, 59 nt, Homo sapiens
ggcgcccagaagccccgggagcacccggaggagaagaggcgcggaacaagcgggagagc

SEQ ID NO: 247591 - RNA, 59 nt, Homo sapiens
gaaaagaaaggccaagaccaggaaaggaaggggcgcggcgagggaccagcgacagagag

SEQ ID NO: 247592 - RNA, 70 nt, Homo sapiens
ggggggccagcggaagaaccccccgggagccagaccggcaccgaagaccacagcgaacgggcacgacggc

SEQ ID NO: 247593 - RNA, 80 nt, Homo sapiens
aaaaagcaggaagaaaaacggcaaacgagggcccaacccaaaagaccgaagagaaacaacgccagaagcaggacggcacc

SEQ ID NO: 247594 - RNA, 84 nt, Homo sapiens
cgcggccgcccgggccgcgggaagcgaggagcccgggaaggacccaccaacaaccgaaaacaggggaacagaagcaggcggcag

SEQ ID NO: 247595 - RNA, 77 nt, Homo sapiens
gaggggaaggggaaacccaaacaacacccgcaccgggcgccccgcaggaggggcacgcccggaagaccagacccgca

SEQ ID NO: 247596 - RNA, 90 nt, Homo sapiens
gaagccagacgggcacacaccggcagccacagcccgaagcggcaagaagggcgcacccacgacgcgcacaccaccggcagaccggcgcca

SEQ ID NO: 247597 - RNA, 74 nt, Homo sapiens
aaaaaaccaggcgaggagcaaggcgcaacgggacacaccggcgggcacagcaagagaagagcgacgcggcagcg

SEQ ID NO: 247598 - RNA, 70 nt, Homo sapiens
cccgagaagaaggaggcgcaagcccaaaaggcagagcgaggagagaagaaggagggaaagccaaacaacg

SEQ ID NO: 247599 - RNA, 80 nt, Homo sapiens
caaaccaccaaaaacaacacccagaaagagccccacaccaggagaagcacagcaccggaacgcgagaaagcagggcaccc

SEQ ID NO: 247600 - RNA, 56 nt, Homo sapiens
gcacggggagggaggccggcgccaggacgaagaagagagaaggggcaagaaaggaa

SEQ ID NO: 247601 - RNA, 78 nt, Homo sapiens
gcagaagggacgagcgcggagccgggggggcgagcccgccgagagcgccaaggaggagacaacgggggaagaagaagg

SEQ ID NO: 247602 - RNA, 64 nt, Homo sapiens
cagaggcagagaaaaaccgcagagacgcgagaccggccgagcaaggagggagcgccacagagca

SEQ ID NO: 247603 - RNA, 83 nt, Homo sapiens
gagaagcacaccacgagaggaggggaagacacgaagcagcacaggaggccaccaacagcagcaaccgagccggacgcgccccg

SEQ ID NO: 247604 - RNA, 41 nt, Homo sapiens
cccgagagcggggacagggcgaggaggcccaggccgaggac

SEQ ID NO: 247605 - RNA, 68 nt, Homo sapiens
cgaaggccaaagagcagaagacaaaaacaccaaaccaacaccagaaagccgagggaaagacagacgga

SEQ ID NO: 247606 - RNA, 82 nt, Homo sapiens
gcgcgacgcccagagccgcggccggggcgcgggagcgccggccggggagaagagcacccccaggcaccagcgccaaggagcc

SEQ ID NO: 247607 - RNA, 69 nt, Homo sapiens
gcggccagcaccccaacgggccaaagaaggacagggcgaaccccgcgccccgcagcggagagcgcggcc

SEQ ID NO: 247608 - RNA, 82 nt, Homo sapiens
ggaagagaagccagaacgcacccacgcgaaacccccgccaggaacaggaccgggaacaccaccccggaaggaaccgccccca

SEQ ID NO: 247609 - RNA, 67 nt, Homo sapiens
gcgcccacggccgggccacccacaggccgcaaaggcgggcagaagcgagagcaggggaaggagcacg

SEQ ID NO: 247610 - RNA, 77 nt, Homo sapiens
aacaggggcgccccaggagcaggcgagaggcaggaggacaagcagcgcagaacgcacggagagaaacccgcgaacaa

SEQ ID NO: 247611 - RNA, 74 nt, Homo sapiens
acaacccccaacaaggccggaagggcccagacccgggagacccgggaagaggcgcagccgagccaaagaaaaag

SEQ ID NO: 247612 - RNA, 68 nt, Homo sapiens
cgccaaccacgacgaagcggaaggcagaaggcgacagaggaagaggaaacacccgcagaacggcccgc

SEQ ID NO: 247613 - RNA, 69 nt, Homo sapiens
ccaaaaacagaggagaaaaggcggacagcagcgcaggcaaaaaacagagagagggaagacgacccagaa

SEQ ID NO: 247614 - RNA, 66 nt, Homo sapiens
agcaccacaagccgaggcaacaacggaaaaaacgaaacaagaagcgaaacagaagaccaggaccca

SEQ ID NO: 247615 - RNA, 68 nt, Homo sapiens
gccaagggcggccccgaggaagcaaggccgcggggggagaccccaccaccgaggccaaggcccgcgcc

SEQ ID NO: 247616 - RNA, 85 nt, Homo sapiens
ccacagcacccccaggagaggccgagagccagcaggcagcggaggcaggggcagccagcagccggcccgggggcagccaccccac

SEQ ID NO: 247617 - RNA, 77 nt, Homo sapiens
ggagaaaacccagaaaaaagggcaggcagcgcggagggccgcggaaaacagcgaagcggccacagcagccagccagg

SEQ ID NO: 247618 - RNA, 78 nt, Homo sapiens
agaggcagccggaggccggaaaagagcagggccagccagaaccaaagccaaagggggaagagaggaggagcaggagaa

SEQ ID NO: 247619 - RNA, 115 nt, Homo sapiens
cagcacacaaaccaagaaccaaggaggaaaacccgaagcagcagaacagaagagaagccaacgcacacgaggcaacgcggcgcaaccaggaacgcgggcccagggaaccgcaacg

SEQ ID NO: 247620 - RNA, 80 nt, Homo sapiens
gcgagagggcggcgaaggaggcagaggcacagcgcaggcccgaaaccaaccagccggccagaaaaggaagaacccaggca

SEQ ID NO: 247621 - RNA, 72 nt, Homo sapiens
caaaggaacaggacagaaaagagcaaacgaggcacaccggggagacaaagacaacgccaaagaaccaagaag

SEQ ID NO: 247622 - RNA, 76 nt, Homo sapiens
aaggggccaagaaggccgggcgccaccccaaaccaggaaagacagggagcagaaagagaaaagaagagagaagcca

SEQ ID NO: 247623 - RNA, 111 nt, Homo sapiens
aacccccgccgccccgcgcgcgcggggccccgcgcccccggcgcgccacgccccgcccgggagccagggaggcagacagaaaaagaaacgcaaggaacagagcagggacga

SEQ ID NO: 247624 - RNA, 69 nt, Homo sapiens
agagcccaagcacacgcccaccacaaagggagagcagaaagacgagccgccggggaaaaagcgcagcaa

SEQ ID NO: 247625 - RNA, 79 nt, Homo sapiens
ggccaaagccgcccagacggccaccggcgggaggaacaaaagcaaaagcagccaacacaacgaagaggcacagcagaga

SEQ ID NO: 247626 - RNA, 72 nt, Homo sapiens
cccccgggccaaaacccagaagaagcacaaaacagaggacacggaaggcacagccccgcacacacaaaccac

SEQ ID NO: 247627 - RNA, 86 nt, Homo sapiens
agagagccaacgaaaggaagagggagcagagcaagaaaaaaaggaagacgagaccagcccacggagaagaacgcgcggcggcagcg

SEQ ID NO: 247628 - RNA, 52 nt, Homo sapiens
cagccgcgcccggacagggaggcacaagggcgaggaggccgcggacgaaaga

SEQ ID NO: 247629 - RNA, 87 nt, Homo sapiens
agccagaagaggacgggaccgggaccgcccggacccggccgggagaagcagcagagaaagagagcagcaccagcagaagagggcccg

SEQ ID NO: 247630 - RNA, 98 nt, Homo sapiens
caaccaccacccaccggacagagagccagaaacgaagagacgcaggcagaaggaaagggcgcagaccgggcagcagcagccgcggaacggccaggcca

SEQ ID NO: 247631 - RNA, 74 nt, Homo sapiens
acagcggaggagaccgggaaaccgccgaagacgaaggaggggacaacaccacagaagaagaaaagaacgcaggg

SEQ ID NO: 247632 - RNA, 59 nt, Homo sapiens
aaggcaaaacaagacaagaggggaaagaaagcacggagggaggagagaaagaacccacg

SEQ ID NO: 247633 - RNA, 71 nt, Homo sapiens
caccagcagcaccacccccgcccgaccgcccagcccccccacagggaagcggaaaggaaaagcacaaaccg

SEQ ID NO: 247634 - RNA, 75 nt, Homo sapiens
gaaggaacccgacaagagcgggaacagacagcccagaagaaaagagggcacaagccaaagagaccgaagaagagg

SEQ ID NO: 247635 - RNA, 60 nt, Homo sapiens
acgcccagagccgcggccggggcgcgggagagcaaacagaacaaaaacaagaaaagcgac

SEQ ID NO: 247636 - RNA, 77 nt, Homo sapiens
gcgccaagcaaggccacgcaaccacgggcggcgaaaggggcgggcacaacgaaacgaaggagccaaaaccagcacaa

SEQ ID NO: 247637 - RNA, 87 nt, Homo sapiens
ggagcgcggcgcgggagcccgaggcgagaccaccggaggaagcggcgcgagcgccccgccacgcccgaccaaagacggaaagaggcc

SEQ ID NO: 247638 - RNA, 58 nt, Homo sapiens
agacagacaagaccaacgaacccccagccccagaaaggagcaaccggaacacgaccga

SEQ ID NO: 247639 - RNA, 37 nt, Homo sapiens
ccggcaaccgccccgcgagaaacccccacgaagcgaa

SEQ ID NO: 247640 - RNA, 83 nt, Homo sapiens
acagcgcggcccgcgaggagccgccgcgcgcccgcgcccccgcgcgacgccaggaccaagaacgcccagcccgcgggcaccgg

SEQ ID NO: 247641 - RNA, 84 nt, Homo sapiens
cccagccgccgccgccgccgccgccgccgccaccaccaccgccgcgccccggcgcccccccgagaaccagaagacaaaaacaag

SEQ ID NO: 247642 - RNA, 78 nt, Homo sapiens
caaagccagcagcgaggcaagggacggaccagagccagccaggagcccgcccaacagccgacacggagagacaagcga

SEQ ID NO: 247643 - RNA, 68 nt, Homo sapiens
agaaaaaaaaagcacaacccagccagagaaacaaccagcccacagcagaacagcggagaagcaacaag

SEQ ID NO: 247644 - RNA, 70 nt, Homo sapiens
caggcacgggagaccgcaagagaagacagcgaacccacccaacacggcaaaacaaagacaccacacccaa

SEQ ID NO: 247645 - RNA, 72 nt, Homo sapiens
gcccccagccgcagccacaacaccggcaggaaccaccaggacagaggggaccggccaagcagagccaagagc

SEQ ID NO: 247646 - RNA, 73 nt, Homo sapiens
acagcaccagggccagagcgagcgacagccaggagccggacgagaaaccaggcaaacagccggagaggagccc

SEQ ID NO: 247647 - RNA, 76 nt, Homo sapiens
aacaagccaagaggacccgaagccacagccccaaggacgaaagagggccccacgcccaaaccaaacgaacaaagag

SEQ ID NO: 247648 - RNA, 51 nt, Homo sapiens
gcacaggaagaagcaggcagagggagcgggaaacgcacaacagagaacaga

SEQ ID NO: 247649 - RNA, 83 nt, Homo sapiens
gagacccacaggagccccggaccaccgagcacccaggcagaaaccagaaaacaacgagcggaacgacggaacaaacaacagcc

SEQ ID NO: 247650 - RNA, 93 nt, Homo sapiens
cgacaaccagaaggggaacgaaagacagaagcagagcgaacagagcccggagaagcaaggcccacgcggacgaagcccagccccccccgccca

SEQ ID NO: 247651 - RNA, 78 nt, Homo sapiens
ggcaagggaagacagcagaacccggaaaggacaacgaccaaggccggagccaaacgagagagcacgcagggagcgccc

SEQ ID NO: 247652 - RNA, 88 nt, Homo sapiens
cccgagagaggaccagcggccagagcccaggacgccacccggaggacagggcacaacaaccgcgaacccagggaccagggcgccccag

SEQ ID NO: 247653 - RNA, 79 nt, Homo sapiens
gaaaccggccgcagcagcgcacccccagggcagacgcgaaccgcacaggaagaggagcccgggcggcgggggggacccc

SEQ ID NO: 247654 - RNA, 71 nt, Homo sapiens
agagaagaagaacagagagaacaaaagagcagaaggaaaagacccaggggagagaggggcacaaacaagaa

SEQ ID NO: 247655 - RNA, 78 nt, Homo sapiens
gccaccgggcacggagcgaggcagccaaacggcaagacgcagcaagaacgggacaacggcagggcggcacccaacaaa

SEQ ID NO: 247656 - RNA, 57 nt, Homo sapiens
caaaaagagaggaacagcaacaggccagagaaaggggaacgcaccccacaaccagcg

SEQ ID NO: 247657 - RNA, 56 nt, Homo sapiens
cacacggaagagacagaccacaggggaaaagaaggcccagcagaggggagaggacg

SEQ ID NO: 247658 - RNA, 55 nt, Homo sapiens
acgacggcgcaagggaaaaagcaaaccgccacgccaaggcagcgaggccaagaaa

SEQ ID NO: 247659 - RNA, 60 nt, Homo sapiens
ggccggggagacgcccggccgcgaggagacgcggcagcagacaagagcgccgggaccagc

SEQ ID NO: 247660 - RNA, 79 nt, Homo sapiens
cacaaggaaagaacccagaaaggaagaagaaaagagaagggaaacaaagagaggacccagagagggaccagggccaaag

SEQ ID NO: 247661 - RNA, 38 nt, Homo sapiens
ggagaagcgccgccaacgaggagccgccgcagggcgaa

SEQ ID NO: 247662 - RNA, 72 nt, Homo sapiens
acacaaaaaaggaagagggaacaccagaagaaaggacgaagcaacagacacaccagaaaccgggcaaaagga

SEQ ID NO: 247663 - RNA, 62 nt, Homo sapiens
ggacaggagaaggggcccagcgcacagggaagcgccaaagaagcgacgcgaaagaaagaaag

SEQ ID NO: 247664 - RNA, 49 nt, Homo sapiens
agcagcaagagcccaaacgcgcgcgggacaaccaacacaaccaaagaga

SEQ ID NO: 247665 - RNA, 99 nt, Homo sapiens
ggcggggacgcaggcagcaggaccacgggcgggcggaggggagcgcaggcagaacgaggaaccccagagaggacagaagccaaccaggcagcagaggac

SEQ ID NO: 247666 - RNA, 76 nt, Homo sapiens
gggcgcgcggaggggaaaggcgccgaaaacaagccggaaggggaaaggacaagggacagcagccgcagaagacgac

SEQ ID NO: 247667 - RNA, 64 nt, Homo sapiens
gaacgagacagaacaggaaaaagggcccccgaggagggaacaagccagaccaggaggagaaaac

SEQ ID NO: 247668 - RNA, 79 nt, Homo sapiens
gagccgcaccgccaacccccgagcaagacggggcagggagaccccaaggcaaaaccaccacacgacaaaaaccggaacg

SEQ ID NO: 247669 - RNA, 74 nt, Homo sapiens
gccaaacacaacccgagagcagccaggagccggacgagaaaccaggcaaacagccggagaggagcccaagagag

SEQ ID NO: 247670 - RNA, 38 nt, Homo sapiens
ggggccggagggccgagcccgaaaagcaaaggcccacc

SEQ ID NO: 247671 - RNA, 78 nt, Homo sapiens
caacaaggcaacaacgaccacccaagcaggcaaaacaagggagagggggcaggcaaaccgggaaagcaagccaaaaca

SEQ ID NO: 247672 - RNA, 73 nt, Homo sapiens
aaccggcacaaagaccaaggagaaacgacaacagacacacagggcagcaaaagcgcccgaaccagcacaccag

SEQ ID NO: 247673 - RNA, 83 nt, Homo sapiens
cagccgcccagccgcccagcgccgccgcgcccggccaaggagaaggaagcgccggccaaacgagcacagcaaacgcgaaagag

SEQ ID NO: 247674 - RNA, 50 nt, Homo sapiens
cccgcccacacggccaggaacagcgccgaagccaagaagcgcacagaacg

SEQ ID NO: 247675 - RNA, 85 nt, Homo sapiens
cccagaggggacggcgccgcaggagaagccggaggcacaagcagaggaaccagggaaccgccgccagcaaccaacaggcacgagg

SEQ ID NO: 247676 - RNA, 71 nt, Homo sapiens
cgggaaaaaacagccagcgcggccaaggaccgggggagcggccgaggacaagcacaagcagcaccaaaagg

SEQ ID NO: 247677 - RNA, 114 nt, Homo sapiens
aaaaggaaaccaggcagaaaagggcacaaggacacagaaaagcgaaagccagaaggacggcacgggaaacacgagaccggcgcagcagagcagaaacaacaccgcccgacgggc

SEQ ID NO: 247678 - RNA, 71 nt, Homo sapiens
gcccagcagcccaggccgagacgaaaggcagcgacggaaaaccggcagcaggagaggccacgccagggaag

SEQ ID NO: 247679 - RNA, 77 nt, Homo sapiens
aggccaggaacgcccgcggaacggcgcaggcccccaaccgcgggcccgaagagggcggcaaggaggacgacgggagc

SEQ ID NO: 247680 - RNA, 76 nt, Homo sapiens
ggccccagaacagggagaaacacacaacaaaaacgcgaaccaggcacgagcccgggcggacaggggaaacacaggg

SEQ ID NO: 247681 - RNA, 85 nt, Homo sapiens
aggcggggcagcgaggcacgaggacaagacgcagaggaagggggcggcgggaggcccagccgggacagcacggggcgacaccgcg

SEQ ID NO: 247682 - RNA, 74 nt, Homo sapiens
ccgcagacgcccccccacgcaggagccccgaccagcagaacggccgagcgaccaggagaggagcccccgcccga

SEQ ID NO: 247683 - RNA, 67 nt, Homo sapiens
ggccggcccacacacccgcgcaccgccacggggggcagcacagacacaagaagcgccacacagacac

SEQ ID NO: 247684 - RNA, 70 nt, Homo sapiens
ccacgaggacagagaagagagaagccaccagcaaaaggccagcggaccaaagggagccacagcacagcag

SEQ ID NO: 247685 - RNA, 81 nt, Homo sapiens
cggcgagagacacacacccgccaggcgccggccacccccacacagcgcgggcgggagaacgggcgcaccggccagacgagc

SEQ ID NO: 247686 - RNA, 72 nt, Homo sapiens
cccagcagggagacaaccaaagagagagaaaccgaagaaggcccacacacacaggaaggcagaaagcacagc

SEQ ID NO: 247687 - RNA, 70 nt, Homo sapiens
cgccaaggacccagccggagacggggcacagcagggacagaacgaagaaaggccagggggcacaaagaac

SEQ ID NO: 247688 - RNA, 81 nt, Homo sapiens
aaaagaacccacagcccaccaaggacagcccagccacaccccaaaagggaaagggccgagaagaagcggggacggcaaaac

SEQ ID NO: 247689 - RNA, 79 nt, Homo sapiens
gggcagccggccacggagcgccgcaggcacagagaaagagagcgcccccagagcggacaaccagaagcacagaagaaaa

SEQ ID NO: 247690 - RNA, 85 nt, Homo sapiens
gcggcccagcggaaacgacacgaaaaaaccggagagaaagaaagaaaagagcagggacagccgccggggggggaaaaagggacca

SEQ ID NO: 247691 - RNA, 85 nt, Homo sapiens
ggaggcgcgagcgagccgcgaaccgagcgggcggcgggcgcgcgcaccagggggagaaacccgggaccaggcgaccggcccgagg

SEQ ID NO: 247692 - RNA, 61 nt, Homo sapiens
cccagcggcagaacgcacagagggagagcagggggagaaaggacggaccacagagacacgg

SEQ ID NO: 247693 - RNA, 79 nt, Homo sapiens
acgagaaggccaccaagccaaccccccagcccggacccaaagaccagacagcgcaaacagcgaccggcccagggggcag

SEQ ID NO: 247694 - RNA, 71 nt, Homo sapiens
accaaagacaccccagcaagcagaaggccccaaagccaacaccgcagaacacccgccaaaacaccaaaccc

SEQ ID NO: 247695 - RNA, 76 nt, Homo sapiens
ggacacgcgccggaaggggcccgaagcccccgcaggaaccacaacccaaccagaaggcaggccagggaaccgaaaa

SEQ ID NO: 247696 - RNA, 39 nt, Homo sapiens
ccgaagaccagaagcaaggccagaccgcacccagaccaa

SEQ ID NO: 247697 - RNA, 36 nt, Homo sapiens
cacgcccagacgaacacaagggccacccggggacca

SEQ ID NO: 247698 - RNA, 92 nt, Homo sapiens
gaaaccgcggagcgacagaaacccgcacagaagccggcccgcaacgcaagcggggcccccacagaacccagcccccgcaaggaaaccaggaa

SEQ ID NO: 247699 - RNA, 56 nt, Homo sapiens
cccacagccccacccgcacaaacacccaggaaaggaagcaggcagcggccacacag

SEQ ID NO: 247700 - RNA, 78 nt, Homo sapiens
aacgcgaggggagcaccaggaccgggccggaacgagacgcacggcgccacaggagccgcagaagcaaaggcaccgcca

SEQ ID NO: 247701 - RNA, 86 nt, Homo sapiens
gaagcgcgggagaagcggcgcccaccggcgggcaacacccgccgcagaggaaaggcagcaacaggggaagcggagggaggcaaaga

SEQ ID NO: 247702 - RNA, 74 nt, Homo sapiens
cccaaaggcacccgcgagcgcaacccaaggcgaccggcccgaggaccgccgcacgaccaaacgcagaacccaca

SEQ ID NO: 247703 - RNA, 81 nt, Homo sapiens
cggcaaagcgcagcccgcagacagaggggcgacgaccgcacaacagaagggagccacgaagcccccacccacaggcgacag

SEQ ID NO: 247704 - RNA, 66 nt, Homo sapiens
ggacgcgcaggggcacccccacggagcccgaggcccacgcggaccggcagcgccaccggaccacca

SEQ ID NO: 247705 - RNA, 75 nt, Homo sapiens
gaggcggagaaacaccaacaggaacagaaaggaagcgacacagaacggggaggggccacccagagcacaacagga

SEQ ID NO: 247706 - RNA, 73 nt, Homo sapiens
cccaaggccggcccacaccagccaggcgcacgcggggaggaagagaagaggcacgcaagaccagaggaaggac

SEQ ID NO: 247707 - RNA, 65 nt, Homo sapiens
ggagggggcaagaacaaacaacgaaacaggcagagaggacagacgcgcgcagccgggccggccaa

SEQ ID NO: 247708 - RNA, 47 nt, Homo sapiens
acgagcaaaggaagcgcgaacagcagcgcaggcgaccggcccgagga

SEQ ID NO: 247709 - RNA, 75 nt, Homo sapiens
gagagacgcagcgagcaggaagaggccagaccacgagggacagacccgaggcccacagggaagaggcggaaaaca

SEQ ID NO: 247710 - RNA, 89 nt, Homo sapiens
accaggcggccaccaccagagccaagagcaaaccaacaaaaccccacaaaaggagaaagcagcaggagagagaggaccacggaaagcca

SEQ ID NO: 247711 - RNA, 77 nt, Homo sapiens
ccaagagcacaggcagaaggcacaaggaccgccgggcgaagggggggcagagccgggccccagccaggggggacaag

SEQ ID NO: 247712 - RNA, 81 nt, Homo sapiens
ccgaccgcaggagggagaccacagcaagacgccaggacccacggaagccagaaaggaacaacaggagacaaagaaaccagc

SEQ ID NO: 247713 - RNA, 64 nt, Homo sapiens
cgggcaccgggcagcccgggcgggcccagcccagaggaggacaaccgccaaaggcacagccgaa

SEQ ID NO: 247714 - RNA, 68 nt, Homo sapiens
agagggaccacacagaaacgaacagagagaagggcgggagaaaccaaggaaagagaaaagcgggaggc

SEQ ID NO: 247715 - RNA, 73 nt, Homo sapiens
gaacaaaggaaccgcccgccacgccgcaacccgcggcagagagaaaagacaccgaccagaccccggaaacagg

SEQ ID NO: 247716 - RNA, 64 nt, Homo sapiens
caagagcgacagcggacaaggcaggcccggaggccaagaaggggaagaagagcgagaagagagc

SEQ ID NO: 247717 - RNA, 85 nt, Homo sapiens
gccgagccgggaccaggcccgggggcggcggccacgccaaggacggagaggcaagcaaccccggggaagaggccaggcagccacg

SEQ ID NO: 247718 - RNA, 76 nt, Homo sapiens
gaagaaacccacgaaccaaaagggacggacaaaggaacaggaccaggaaggcacaccagcgccggagcggacgaga

SEQ ID NO: 247719 - RNA, 66 nt, Homo sapiens
agaaggaaaagggaaggacaaggaaacaaacacaaacgggggaagaggaagaacgcgagaaaaaaa

SEQ ID NO: 247720 - RNA, 68 nt, Homo sapiens
cagaaccgaaaaagagcgggcggaacagcccgggggaggcgcagaggggaacaaacagaaaccagaac

SEQ ID NO: 247721 - RNA, 61 nt, Homo sapiens
aaaaggggaaggaggcggcaacgagccacgacacacgcagggaggggaaccaggggccgaa

SEQ ID NO: 247722 - RNA, 81 nt, Homo sapiens
ccaagaggagacggcgcgggcagcagcccagaccccacagccagccgagggcgagaagcacagaaacccgcagacacccca

SEQ ID NO: 247723 - RNA, 66 nt, Homo sapiens
aacgcccaccgaacggccagagaaggggaggcaggaaaaagacacaagacagcaggaccgggacca

SEQ ID NO: 247724 - RNA, 56 nt, Homo sapiens
aagacagacaggccggcgggagcccgggaaaaggcaacagaaagacggcaacacac

SEQ ID NO: 247725 - RNA, 62 nt, Homo sapiens
ccgaccaggcggagaagaccaaaagagggcaccgccgaccgaaaccgcaaacacacgacaga

SEQ ID NO: 247726 - RNA, 77 nt, Homo sapiens
acaacaggcgagaccggagaggaccggacgggggaggcaagcaggggggcaaaggaaagaaggcagaaagggaggcc

SEQ ID NO: 247727 - RNA, 39 nt, Homo sapiens
gagcaggacgaaaggaacccgccgacacagcccccgagg

SEQ ID NO: 247728 - RNA, 65 nt, Homo sapiens
ccagaaccaaggagcacaacggacacacacagggggggccgcccgcccaaggcaggaagaggggc

SEQ ID NO: 247729 - RNA, 77 nt, Homo sapiens
gaggcagaccacgagaagccagggccaggcagcgaagaagacaaagaagaaaacaaagccagccagaagaagaggca

SEQ ID NO: 247730 - RNA, 58 nt, Homo sapiens
gccgggccggcagccggacaccagaaccaaaggcagacccagaagagcacaaaacaga

SEQ ID NO: 247731 - RNA, 86 nt, Homo sapiens
cggagccggacgcggggggcgggaagagccggggccgggcgacaggagcagaggccgcgacagccaccaaagcagcgcggacaaga

SEQ ID NO: 247732 - RNA, 58 nt, Homo sapiens
gagccgacggaagagacagagagggaagaacccccagacggagcgcccacgccaggcg

SEQ ID NO: 247733 - RNA, 99 nt, Homo sapiens
ccaggccccaaggccggaagaagggagagcagaagccgcgaaaaaggggggccgagaacacaggcagcaccccaacgcagccccgcccgccgcccccac

SEQ ID NO: 247734 - RNA, 83 nt, Homo sapiens
gaaagcgcaggccaaaaacgagaaagagagcgaaacaaggcagagcacgggacgcaggaacccagaaaacaacccgaacagga

SEQ ID NO: 247735 - RNA, 62 nt, Homo sapiens
aacaggcacgccaacagacccagccggcgaccaggagagccaggcccaagaggagccaaaca

SEQ ID NO: 247736 - RNA, 77 nt, Homo sapiens
cgggagagagccaccgccaaacaaaggcccacaacaagcgcgcgcagaaccaacaaaagcgaaggaaaagggagcga

SEQ ID NO: 247737 - RNA, 52 nt, Homo sapiens
gacagccggaacaaagagacagaaacccgcaaccaaacaaaaagagaaaaga

SEQ ID NO: 247738 - RNA, 79 nt, Homo sapiens
ccgccggaagacaaagaagaaagcccacagagacacaaccggagcccagagccacgcaaacaacggcggcacaagaaag

SEQ ID NO: 247739 - RNA, 65 nt, Homo sapiens
ggaggcaggggcagaaacagagaaggaacagcccccggggccacacgagcccagcccagcgagca

SEQ ID NO: 247740 - RNA, 62 nt, Homo sapiens
caagccgggcccacgacgccgcccggccgagggggccaaagggcgagggcacaaaaaaccac

SEQ ID NO: 247741 - RNA, 81 nt, Homo sapiens
cgaaacgaaagggagccgccagcgcgggcggaccgacggagacggaaagccgggacaggaggacccaaagacaggaccacg

SEQ ID NO: 247742 - RNA, 77 nt, Homo sapiens
cgagcagaccgcgaaggacgaaggagggcccacgggccccggaacacagggaaagaccacagcaagaccacgccccc

SEQ ID NO: 247743 - RNA, 58 nt, Homo sapiens
agcgaaaaagcgggaacgcaggacccaaagcgccagagaaggacaagaagccaagccg

SEQ ID NO: 247744 - RNA, 77 nt, Homo sapiens
ccaagcacagaagaaacacagaaagacggggcaaccagggaccgcgaagggaacccagagaacacagccgaagggaa

SEQ ID NO: 247745 - RNA, 76 nt, Homo sapiens
gccccacagaggggcgacgcccgccaaggaacccgcggggcagaccacaccagcacacccagcacggcaaacaaag

SEQ ID NO: 247746 - RNA, 69 nt, Homo sapiens
gggcgagcaccaccgccccggccgcgcaaccgcaccgaaccaaacgcccagcgaggaaaggccgacgcc

SEQ ID NO: 247747 - RNA, 87 nt, Homo sapiens
gagaccgcggaggccgacaggacgggcgccgccccgcgcggcaggggccaacggccgccaccaaaaagaagaagggaaagcgcgaag

SEQ ID NO: 247748 - RNA, 79 nt, Homo sapiens
accacaggaacaaggagaagaccaggaagagaaagagaaaggacaagcaggaacccccagaaacgaaggaggcccaacc

SEQ ID NO: 247749 - RNA, 89 nt, Homo sapiens
cgagagaggaggagccagacgacaagcacacacaggcgcgaaacggaaaaaggaaaccaccccacccaacccccgacacagaagaggag

SEQ ID NO: 247750 - RNA, 69 nt, Homo sapiens
caagacacacaaccaaacaggagaaaaaggaggcgcagccacaagcccgaggcgagggaccaagaagca

SEQ ID NO: 247751 - RNA, 71 nt, Homo sapiens
accacagaaacaaaagcaacaaagagggccggaaaaacagggagagccacagagggggaaagccaaggaaa

SEQ ID NO: 247752 - RNA, 76 nt, Homo sapiens
gggaaggggaaaaaagccgcacaggaaagggaggggcgagcgacgcggaaagaagacccccagaaaacagaacccg

SEQ ID NO: 247753 - RNA, 81 nt, Homo sapiens
ggagccgcccggcgccggcggggccccgcgaggacgagccacacaggcacagcacccaacggcagcaacgagcccaaggaa

SEQ ID NO: 247754 - RNA, 47 nt, Homo sapiens
ggggggggaagccgcagcggaaagcaggagcacaggacagcagacca

SEQ ID NO: 247755 - RNA, 78 nt, Homo sapiens
gcagacccggccagaaagcccaaagggggaggggaacagcagcggagaacacggcagagacaaaacggaccaccgcga

SEQ ID NO: 247756 - RNA, 76 nt, Homo sapiens
ccggaagaccaggaaggagccggggcgacaaaaggacagcgacagacagcaaacacagccagaacagaggaccggg

SEQ ID NO: 247757 - RNA, 76 nt, Homo sapiens
acaccaggcacccgggcccagccgggaacccccacgcggccagcgaaaacgcccagggggcccggggaaaccgccc

SEQ ID NO: 247758 - RNA, 79 nt, Homo sapiens
ccagcgcgcgccccaagagcaggaaaccagcagggcaaccccgggaacgaaacaaaagccgccgcgcagaaacccgggc

SEQ ID NO: 247759 - RNA, 71 nt, Homo sapiens
ccggcaccaggaccaccgcggcagcacgcggcggaaggagacccaggaagaaagggcgaaggacaccggga

SEQ ID NO: 247760 - RNA, 80 nt, Homo sapiens
cacaaaccaaacagaaggacaagcaaaaaaaaccgccccgccagcagaaggagcagaccagccagccccaagcagccgca

SEQ ID NO: 247761 - RNA, 64 nt, Homo sapiens
ggcaccaaggaaagcagaagacaaggcccgagggcaggacagcaggcaccggcgaagcacagag

SEQ ID NO: 247762 - RNA, 69 nt, Homo sapiens
ccaccaaagaggaccaacaaaaacagaccagaagaaccaaggcaggggcggaacccccacaaccacccc

SEQ ID NO: 247763 - RNA, 76 nt, Homo sapiens
agagcacagggagaagaaaagaaacgcaccgggaacgaagacacagaacagcaagacggaacgcaaacgcccaaga

SEQ ID NO: 247764 - RNA, 78 nt, Homo sapiens
ggaggagggcagccaaccaccagcccgggggcagcaggacaagaaaagcgaaccccagcacgccgcagcaccggagag

SEQ ID NO: 247765 - RNA, 78 nt, Homo sapiens
ggcacagaaggcgccaggagaaacaaggcgaacggaaaggcgaaaagcgaagacagccccgcggaaggacaaaagcac

SEQ ID NO: 247766 - RNA, 74 nt, Homo sapiens
gcagggaaaaaagcagcaaacacgggacaaaaaccagaccagacagcgcacgaaacacacaaagaaccaccacc

SEQ ID NO: 247767 - RNA, 56 nt, Homo sapiens
gggagccgcacgcacgccacgcagagcaaagaggcacccagcagcagagcagagcc

SEQ ID NO: 247768 - RNA, 79 nt, Homo sapiens
aacccagacagacgccggggaggcagcgcgggacccagcccaggcggcgcggacggggcggccaaggccgacaaaaccg

SEQ ID NO: 247769 - RNA, 86 nt, Homo sapiens
gaaaaagccaccaagcacagcgcccagccagggcccgagggaccgccaacaagcggcccgcaccgggccagacaacaccacccaca

SEQ ID NO: 247770 - RNA, 88 nt, Homo sapiens
aaggggcccgaacagagggggggacagacacacgcagggccccgagcaggaaaagagccaaagagcaaggcgggggggagaaggaaga

SEQ ID NO: 247771 - RNA, 93 nt, Homo sapiens
aacagcagggccccgggcacgcagggaagcccggggagaaccgcccgccgcagaggaaagcgggcggcaggcgagggagcccgcgcggcgaga

SEQ ID NO: 247772 - RNA, 65 nt, Homo sapiens
ccgagggaccccaaccccagaccgcagagccacaggaaccccgaggagcaccaaacgcgaagaca

SEQ ID NO: 247773 - RNA, 79 nt, Homo sapiens
cagccagcacaccccgcgagcaagggaccaccacacgaaaccaaggaaaaaccgggaacagcagaggccagaggaaccg

SEQ ID NO: 247774 - RNA, 75 nt, Homo sapiens
gaaagccaggaacaaccacccggcccaagagggcggcgaaggcgcgccacggagccacccaagcggccgccaccc

SEQ ID NO: 247775 - RNA, 81 nt, Homo sapiens
caagagcgacaggaggagacaggcgagagaggaggacacgaccgaggaagacaaggcaaggccagccaaccgacggccccc

SEQ ID NO: 247776 - RNA, 69 nt, Homo sapiens
gaacaagggaaggacaacagcaaggacagcaccaaggaaaggcccgagccaaaagacccagagaaagga

SEQ ID NO: 247777 - RNA, 80 nt, Homo sapiens
ggcgcgcggacgcgggcggcgcgggggagcgcgaggaggcgcaggagacgaccgcaacggcaggagcccaaaaggcagag

SEQ ID NO: 247778 - RNA, 79 nt, Homo sapiens
gcccaagagccggagccggcgcccccagagagaccgacgagggggccgaaaccgagagggggagcccccccaagcggac

SEQ ID NO: 247779 - RNA, 72 nt, Homo sapiens
aaggcgaccccgccagaacacccaggcgacaggagaacacaggaaggaaaggccaaggcgagaagagagcag

SEQ ID NO: 247780 - RNA, 80 nt, Homo sapiens
ggccaccccccgcccgagagcacagcgccagacacggcccgcaagccgcgccaagacaagcagaccggaagaccgacgga

SEQ ID NO: 247781 - RNA, 74 nt, Homo sapiens
aacagagccagaaggggggggcgaccgaggaaaaaaagaaccaagagaaaagacacggggagggaggagcagga

SEQ ID NO: 247782 - RNA, 71 nt, Homo sapiens
ggagaaaccaacagcggcgccagcaagaaagacagagcaccaggagggcgcacagggacgaagaaccacca

SEQ ID NO: 247783 - RNA, 87 nt, Homo sapiens
gcggcgagcggggcgcggaggcggagaggcacggaggagccgcggggcgccgccacggccgcccggaggcggagcgcagggcgcgac

SEQ ID NO: 247784 - RNA, 65 nt, Homo sapiens
ccacacccaccaacaacaccacaaaaccacagccaagaggaagccacaaagaaggggacacccca

SEQ ID NO: 247785 - RNA, 38 nt, Homo sapiens
cgcagccgccaccgagacgagggcagggcgaggaaagg

SEQ ID NO: 247786 - RNA, 69 nt, Homo sapiens
ccgccgccccgccccagaagcagccggaccggcccaagcacagggacggaacagaccagagggggagcc

SEQ ID NO: 247787 - RNA, 81 nt, Homo sapiens
acgcgcaacgcgcaccaacccaggacgccaagaggccgaggagaggcccccagacacgggaaagcaccagccccgccagca

SEQ ID NO: 247788 - RNA, 85 nt, Homo sapiens
agccgacgcccaccagcgaacccggcccccgacggccgcagaacgggaccagccgcggaaacgggaaaagaacggcaaacccaac

SEQ ID NO: 247789 - RNA, 65 nt, Homo sapiens
agagaacagccgggaagccaaaccagcaagagagaaaacggaccagacgacgcaagccggaggaa

SEQ ID NO: 247790 - RNA, 77 nt, Homo sapiens
gcggggcggcggcggcagcgcaggacagccagcagaacccgaaagggacgcggaccccaagcggcaccccaccggac

SEQ ID NO: 247791 - RNA, 54 nt, Homo sapiens
aacggcagcagaacgagaagacacccgggcgggaaaaaggagcaaagaaagggg

SEQ ID NO: 247792 - RNA, 71 nt, Homo sapiens
agaaggcagagaacccagccgggcacgcaaacaggcgagcagaacgcaaagaacaaccgccaacaaaggcg

SEQ ID NO: 247793 - RNA, 69 nt, Homo sapiens
gaaggacaaggaaacaaacacaaacgggagccaaagcagacccccaagcgagcggagcggaaggagcgc

SEQ ID NO: 247794 - RNA, 83 nt, Homo sapiens
gacccccacccggaaacaccaaagccagccccccaaaggagaagcaaaaacccaggagagaagcagcaacaaccggacacaag

SEQ ID NO: 247795 - RNA, 52 nt, Homo sapiens
gcgcggacgccacccgggggcacagcaaggaacggccgagcgaccaggagag

SEQ ID NO: 247796 - RNA, 94 nt, Homo sapiens
accaagaccaaggaagacgaacgcaccccagagccgacccccaccgcaagggaacccacgacaccacgaacaagaagccccagcaacaaaacaa

SEQ ID NO: 247797 - RNA, 75 nt, Homo sapiens
gcaacaccgggaccaagcgacaacgaaaaaaagccggacaagaaccaaagaccggaagacaggcaagacgaagca

SEQ ID NO: 247798 - RNA, 70 nt, Homo sapiens
aaggccagcgcagaaacgcagggacacaaagcgcgggaaagaaccccgcacccggaacaccagccagcca

SEQ ID NO: 247799 - RNA, 73 nt, Homo sapiens
cgcgagagacacaggaacgcaaagagcccgggaagggcgcggagcaggcaaccacccaacccgggaagggaca

SEQ ID NO: 247800 - RNA, 63 nt, Homo sapiens
agcgaagcgcacggaaggaagcagggccgagaaagaagcccacaggggcaacacagcccaacg

SEQ ID NO: 247801 - RNA, 77 nt, Homo sapiens
gcaagcagcagaagagccaaggaaaaacagcaagaacccaaaagggacgaagaagaccggaaagcaggaagggggaa

SEQ ID NO: 247802 - RNA, 71 nt, Homo sapiens
gggaaggacgggcgcggacccagaggggacggcgccgcaggagaagccggagaacaagcaacagacaaggc

SEQ ID NO: 247803 - RNA, 75 nt, Homo sapiens
ggggcaccgcgcggacagcggcccgggagaacggcgcaagcggcccccggcgaaaaggaagaaggaaacacaggc

SEQ ID NO: 247804 - RNA, 72 nt, Homo sapiens
ggaggagacacgaacagcaagagccaacacagcacaagggcagcaccagaaagagcccagcaaaaagaggag

SEQ ID NO: 247805 - RNA, 80 nt, Homo sapiens
gaaaggcagacgaccggagacgaggggggagaaccagccgacggagcaggcagcagcccaggcaccacgcccaagacacc

SEQ ID NO: 247806 - RNA, 76 nt, Homo sapiens
accaggacacgggcggagccaggaagcgaccggacaaccagaagggacaaaggagcagaacagaccggaggcagca

SEQ ID NO: 247807 - RNA, 75 nt, Homo sapiens
acagcgaggaggccagccggaagacagagagagaaaagagggacgccaaacacccaaagagagacagggcgccgg

SEQ ID NO: 247808 - RNA, 71 nt, Homo sapiens
aaggaccaagaaccaggcccagagcgcggcccaggggccaacggacagaggcccagagcccgggacaagaa

SEQ ID NO: 247809 - RNA, 62 nt, Homo sapiens
caggcacgaggccagccgaaggacaagcacccggaggagaagaggcgcggaacaagcgggag

SEQ ID NO: 247810 - RNA, 72 nt, Homo sapiens
gaagcgaccagcacgagaccgcacagaagcaagaagccacagaggaaaaacacgcccacacaggaaggcacc

SEQ ID NO: 247811 - RNA, 72 nt, Homo sapiens
caccggaaccacaagaagccccgcggaaacaagcaacgacgcgaggaggccccacgcgacagccagcacgga

SEQ ID NO: 247812 - RNA, 51 nt, Homo sapiens
agaggccggcggggcgacaggaaaacagggcggcacccaggcgaagacagg

SEQ ID NO: 247813 - RNA, 77 nt, Homo sapiens
acagagaagaccaggagaaacgaaaacgaaaaggaagaccagagaaacgccaaggacccaggcgacccaacaaaagg

SEQ ID NO: 247814 - RNA, 79 nt, Homo sapiens
cgagagaaaaggcagacgaagaagaagcaagcgaggcccacaagaaggagaaaaaggcagccccggagacgaaaagaca

SEQ ID NO: 247815 - RNA, 82 nt, Homo sapiens
gcgcgcgcgagccgagggagcggaaaggggcccggcgcgcccgagacgaagaccggcgccggaccgaaggcgcgaccacgac

SEQ ID NO: 247816 - RNA, 81 nt, Homo sapiens
cgcacggcgcacccccgccccacccggcacccccaccggaggacacaagggcacggagaccaccagggcagaaaaagagaa

SEQ ID NO: 247817 - RNA, 78 nt, Homo sapiens
ggccagcaagcacgaagaaagggagccgccaggccggccgggagaaggcaagcccgcgaaggaggcagcggcggggcc

SEQ ID NO: 247818 - RNA, 84 nt, Homo sapiens
gcaccaccaacgcggccgacaacagccggcgccgccacggaccacggccaccgcgcggaagaggcgagagggagagcggcgcga

SEQ ID NO: 247819 - RNA, 99 nt, Homo sapiens
cacagcccaaagaacagaacggcaagccacagaacccaacacagagccaaagaaaaaacaccagcagcccagcaaccaaaaagaagaccgcacccaaac

SEQ ID NO: 247820 - RNA, 119 nt, Homo sapiens
agaggcgcgcggaggcgggagcgcggaaacggaaccgggaggcgacgcacacgagcggaggcgaagcccagggcccagacacaggaacgggcaccccaagagcaaagaggagaagaggg

SEQ ID NO: 247821 - RNA, 86 nt, Homo sapiens
gaaggcagaggggcacgacccaggaggagaaagcagccaggcacagacgcggggacggccaggggcagagggcccacccagggacc

SEQ ID NO: 247822 - RNA, 78 nt, Homo sapiens
aaagagcacaagagaggacaaaaaacaccccgaaaacagagggcagagccaggccaggccacacaagccccagccaaa

SEQ ID NO: 247823 - RNA, 70 nt, Homo sapiens
gagcacccgaaagcggcgagagcgaagacccaacccaagagccacgggaagaagggaacaacgagagcgc

SEQ ID NO: 247824 - RNA, 68 nt, Homo sapiens
agacacaaccaaaggacaccagacaacggcaagcggagaagagcaaggccgaaccgagaggaagggca

SEQ ID NO: 247825 - RNA, 55 nt, Homo sapiens
gaacgggacaccgagcgaagccagcaggagagaccaggaaggaaaagcaaaacca

SEQ ID NO: 247826 - RNA, 64 nt, Homo sapiens
gggcggacagcggggcccgcggaaaacaggggcccccggagggccacaagccagagcgccccgg

SEQ ID NO: 247827 - RNA, 85 nt, Homo sapiens
cgcggacgggcgcggcggggacggcgcccgcgccaccaccggcgaagccccggcgaagcgggcgccccagcccagagagccgcca

SEQ ID NO: 247828 - RNA, 78 nt, Homo sapiens
cggcccaacaccccaacaagaacaggagccggccgccggccaccgaaagcgcaagcaagaagaagcggagacggcccg

SEQ ID NO: 247829 - RNA, 84 nt, Homo sapiens
cacgaggccccgggcagcgggccggccacggcgggagagcggcaacggaacgggcacaaagaaggcgcaggcaagacgcagaga

SEQ ID NO: 247830 - RNA, 70 nt, Homo sapiens
cggcgcccggacaacccgagggcccgcggccggcccgaccggacgagacggggagagacagcaaacggaa

SEQ ID NO: 247831 - RNA, 83 nt, Homo sapiens
ccagcaacaccccaggccggggagggcgcgccgaaagcgggcagagagggcaggagaaggagcagagccagaaccacaccgcc

SEQ ID NO: 247832 - RNA, 75 nt, Homo sapiens
ggccccggcccacaggggggggcaaacccgagagaacggagggaaagacaacaaggagaacagaagaacgaccaa

SEQ ID NO: 247833 - RNA, 73 nt, Homo sapiens
agccgagcggagcgccgcggcgcagccagcggagcggaggcagacacacacggggggagagggagggggggac

SEQ ID NO: 247834 - RNA, 77 nt, Homo sapiens
gacggcaggcggcggaagcggaaagcaaggaaacagggcagaagccagacccgcacaccacagaagaacgaagaaac

SEQ ID NO: 247835 - RNA, 52 nt, Homo sapiens
cgcggggaagaagcaagaccagggggaacggagggaacccgcgacgggaggc

SEQ ID NO: 247836 - RNA, 75 nt, Homo sapiens
cggggcgggagccggcagccgacggcaaagggcgggggcaaagcggagaccgggcgccagggaaggaccgcacac

SEQ ID NO: 247837 - RNA, 71 nt, Homo sapiens
aacggggaccagccgagcggccaaaaccacaggaaagaacaaggaaaacgaaaaacgggcagggacaaggc

SEQ ID NO: 247838 - RNA, 80 nt, Homo sapiens
cagcagccacagcaacaacacaaaacaagcccagcaacagaccaggccaaacgaccaagaaagcgggacgcggaaaacgg

SEQ ID NO: 247839 - RNA, 63 nt, Homo sapiens
caaggaggaccccaggacacccggacagagaggcgagacaaaaccagacgagagacagaagac

SEQ ID NO: 247840 - RNA, 72 nt, Homo sapiens
gacccccccaccgcacgcacaaacgggcagaaagaaacacgggccaagaagcaagaagaaaaccaacaggga

SEQ ID NO: 247841 - RNA, 76 nt, Homo sapiens
gggaggggcggcgcggggggagaagaaacaggcagcgacaagacaagccccagcccagaaaccaccccggacagga

SEQ ID NO: 247842 - RNA, 53 nt, Homo sapiens
gaccaacacaagggggccgcaagagcccaaaaggcagagcgaggagagaagaa

SEQ ID NO: 247843 - RNA, 74 nt, Homo sapiens
acaccagagaaggcaacaagcaaacaacagcccacgcggcaaggcaagaagaacagccaaggagagcagagaac

SEQ ID NO: 247844 - RNA, 75 nt, Homo sapiens
gaggccgcggcccaaaggccagaaagggcaaggggggccagccgaacccaaacgagaggccgaggcaggcagacg

SEQ ID NO: 247845 - RNA, 75 nt, Homo sapiens
caccgcaagggccacgcgggcagaccgacagaaggcagaggcagagggaagggcaccaaagaaggagaagagagg

SEQ ID NO: 247846 - RNA, 86 nt, Homo sapiens
aagccaagaagcaaaaaagggacgcaagaagaaccaccaggagaaccagggcacagcgcagcggagcgaggaaagcaggcgggccc

SEQ ID NO: 247847 - RNA, 76 nt, Homo sapiens
cgccccgccgaacacccgagaagggggaccccggagaggaccaccgagagggaacagaccacaggcaaacgagaga

SEQ ID NO: 247848 - RNA, 92 nt, Homo sapiens
gcgccaccaccacgccagccgcaccagccgcccaagccgcacagccgcggcggcagcagcaggagaggccggcgcggaagaggccggcggcg

SEQ ID NO: 247849 - RNA, 51 nt, Homo sapiens
agggccaaagaagggagagaggcgcagagagacaagggcacccgaggcaac

SEQ ID NO: 247850 - RNA, 77 nt, Homo sapiens
ccaaagcgcaaccaccaaaggaagccgccaagccagggagaagaggaaggcccaggaggcaagagcgagaagagcgc

SEQ ID NO: 247851 - RNA, 82 nt, Homo sapiens
agaaaagcccaaaggacccaagaggagagaggcggggaaggaaaaccaacggcccggaggaccacagcccaggggccccagg

SEQ ID NO: 247852 - RNA, 83 nt, Homo sapiens
cccaagcgcggacccggaggcggcgcgggggggcggagggaccaccaagcagggggcagacccaaaggaaacgcacgaaagaa

SEQ ID NO: 247853 - RNA, 90 nt, Homo sapiens
gcgggagccgggcaggacgccgagcgggacccccgccgccccgggggccggacgccaccgacacccagcacccccccgcaaaccgacgca

SEQ ID NO: 247854 - RNA, 40 nt, Homo sapiens
gccaaacgcaggggcgggccaggcagcggcaagagcgggc

SEQ ID NO: 247855 - RNA, 83 nt, Homo sapiens
accccaagcgccacacggcgacagcgacccacggcagggcaaccccaccgcggaaggcaggcacacagacgagaacagagagg

SEQ ID NO: 247856 - RNA, 78 nt, Homo sapiens
ggagaccacagcaagacaccgggaccccggaagccaaaaagaggaaacccacacaccgaagggggaggaagacggccc

SEQ ID NO: 247857 - RNA, 66 nt, Homo sapiens
ccaaggaaacaaaaccacaccgacagcacaaaccgcaaaccaagagacacacggaagaaagagagc

SEQ ID NO: 247858 - RNA, 54 nt, Homo sapiens
caagaggcggacaggcggaacaaaggaacaagacaacacacacgcaccagggca

SEQ ID NO: 247859 - RNA, 75 nt, Homo sapiens
agaaaaaccagcaaacaggaccaaaggaccccaggccccgacaaaacaaagagaaaggaagaagcacgacgcaga

SEQ ID NO: 247860 - RNA, 79 nt, Homo sapiens
aaaagacccaggaggagcaacacgggaccggacaaacgcagaagagacgaaaacagacacaaggaaacccggacacaag

SEQ ID NO: 247861 - RNA, 67 nt, Homo sapiens
gcccacacccgggcgcggccacacgcgacgggggagccgcggcggcccagaaggacggaacagccag

SEQ ID NO: 247862 - RNA, 77 nt, Homo sapiens
aacaaggagagcccagcaacggacccaacagagcacgcaaagggggcaaggagccacaagccacgacccagaaggca

SEQ ID NO: 247863 - RNA, 67 nt, Homo sapiens
ccagcacgggaccccccaagagaagcgcaagagcaacaccccaccccaagggcccgacacccgcgga

SEQ ID NO: 247864 - RNA, 74 nt, Homo sapiens
acccggcccggcccgcggcagcaaacacgggaaagaacaagggaccagacaaagacggagccaggcggagaaac

SEQ ID NO: 247865 - RNA, 59 nt, Homo sapiens
caggaaccaccaggacagaagaagaacaaacgaaaaggcacgccgcccagggaaaagac

SEQ ID NO: 247866 - RNA, 69 nt, Homo sapiens
agacccaaaaagaaagagaccgaaagcgcagagaccaagagcaaagacagcagggagggaagggggaga

SEQ ID NO: 247867 - RNA, 70 nt, Homo sapiens
ggccggaggaaggaaagcccccaggcacagagagcaaccaaaaccgaaaccagcccccaaggggaaccag

SEQ ID NO: 247868 - RNA, 65 nt, Homo sapiens
aagacggcaggaggaagagagagagaggaaaagccacagacagggagcagaacccgagcggcagc

SEQ ID NO: 247869 - RNA, 82 nt, Homo sapiens
gcccaaaagacagaagaaaaacgggaggagagagcaaacccaaaccaaacagcagcacaggggagcgaaggaggcccaggcg

SEQ ID NO: 247870 - RNA, 73 nt, Homo sapiens
gaaagagcccggaggcaagggacggcgggaggagggccgaggcggggccggggagcccgggccagacccccca

SEQ ID NO: 247871 - RNA, 69 nt, Homo sapiens
aacgcacgccaggagccagaggaagaccaaggaagccgaaggaaccccgagggagggaaaagagccacc

SEQ ID NO: 247872 - RNA, 99 nt, Homo sapiens
aacgcgcaccgcagcagccccccccaacccggaaaaggggcgaaacccacaaggccgggcccgggaggagcaggggcagaggggagaacccagccggga

SEQ ID NO: 247873 - RNA, 72 nt, Homo sapiens
ccgggcgcccgcgcccgccccaacccagccacagagaccaaaaaggaacaagaaagaacaaaaccacagccc

SEQ ID NO: 247874 - RNA, 77 nt, Homo sapiens
agcccaccaaacacgccggaaaccccgcccacagcacgagagaagagaggacgaggccgaaaacacagcaccaacag

SEQ ID NO: 247875 - RNA, 58 nt, Homo sapiens
gggagaaaaaggaaaacgcggaaaaccgacacaacaggggaccaaaagaacccagcca

SEQ ID NO: 247876 - RNA, 55 nt, Homo sapiens
cggacgcgcggcacccacacaccacaggaaaccacgcgagcagggaaagcaaccc

SEQ ID NO: 247877 - RNA, 79 nt, Homo sapiens
acgccgaccaggagcaacagacggagaagagccacccccaggccaccacacgagaagggccggcagagaggcagagacc

SEQ ID NO: 247878 - RNA, 86 nt, Homo sapiens
cggaggccgggaagccaacgaccacacgcagagcagcgagagccagaccgggagacgcagcagccgccaccagacccgcaccgaga

SEQ ID NO: 247879 - RNA, 72 nt, Homo sapiens
gcagcccaggcccagacaggagcgggagaaaagaaccgacccacaccaaggaccaggccaaaaccaggaccg

SEQ ID NO: 247880 - RNA, 64 nt, Homo sapiens
gcacaacaggggcgagagcaaagacgccacgcccagcagaaaacaacggcaaggggaaaaggga

SEQ ID NO: 247881 - RNA, 85 nt, Homo sapiens
ggaagagggcggcaccccgaaaccaagagagccgaaaagcagaaaaggaagacaagggaaaagggaccggggaaagggcaccacc

SEQ ID NO: 247882 - RNA, 80 nt, Homo sapiens
caaaacggagagagagaaggacagcaggacagacggaagagaagaaacggagcaagagcagaggagaaggagaaacggag

SEQ ID NO: 247883 - RNA, 89 nt, Homo sapiens
aggagaaaggggagcggaaggggacagaggaaagcacgaagagcgcgccccagggacagaccgcaagccggcacacagcggccgccacg

SEQ ID NO: 247884 - RNA, 65 nt, Homo sapiens
agacgcagcgccacggccacggcccccacgcaaagcaaaaccacaggcaaccccacgacccaagc

SEQ ID NO: 247885 - RNA, 86 nt, Homo sapiens
gcaccgagacccaagaaagaaacccgagaggagcaggagcaaccgacaggcgggccggacagcgcgcccagcacaggagccgcacg

SEQ ID NO: 247886 - RNA, 53 nt, Homo sapiens
gcaccaccaggacagcaaagaaaaagacaagggcagagcagccggggaaaagg

SEQ ID NO: 247887 - RNA, 101 nt, Homo sapiens
aggagcaaaacgcacccccagagagacccaaaggagaaggcgagggcagcggggggagacgaaccggcaaggaacagacgaagagcagagccaggcgaccc

SEQ ID NO: 247888 - RNA, 72 nt, Homo sapiens
gagaaacagcagaaacgcaccaggccaaagaaagagaagccaaggggcagagcacaagaacagccggggcgg

SEQ ID NO: 247889 - RNA, 80 nt, Homo sapiens
acccacgcagagggcggagcggcagggccgacgccaccgccgagcccagaccggaacagacggggggccaacaaagaagc

SEQ ID NO: 247890 - RNA, 76 nt, Homo sapiens
ggaacggccaaacaacagggaaccaaggggacaaaccaacagaagggcaaccagaggagaacacagcaacagaaga

SEQ ID NO: 247891 - RNA, 76 nt, Homo sapiens
cgcgcagagaccccgcaggccacaaccaggccgaagaagagccaagagaaccgaacagaagaaggggcccagaaaa

SEQ ID NO: 247892 - RNA, 80 nt, Homo sapiens
gcccagcagcagcagcccccagcgcccagccaaaccacgaggccacagcacaggcaaccagacagcgaacgggcacgacg

SEQ ID NO: 247893 - RNA, 79 nt, Homo sapiens
cgagcccaccgccaagacggaaaccagggacacagcaggcaggagagacaacagcaacccagcaacagaaggccaaggg

SEQ ID NO: 247894 - RNA, 81 nt, Homo sapiens
ccaagagagcaagaccgggcccacgaggagcagggacggggggaaaagcgcacccgggcccgggcgagaaagaagacacca

SEQ ID NO: 247895 - RNA, 79 nt, Homo sapiens
gccgaaccccaggaacaagcagaaacacaggaggcgggccacaagaccaaggagcgcagaacccagagagacaagcaaa

SEQ ID NO: 247896 - RNA, 73 nt, Homo sapiens
gcgcggcgagcagagaaaccagaggacacggaaaaggagacacaagggagaaccaggaccgaaagaggcgggg

SEQ ID NO: 247897 - RNA, 51 nt, Homo sapiens
agcggggacgcggacgcacgaacgaagcgcgcggcaggcgcgcgccgcccc

SEQ ID NO: 247898 - RNA, 78 nt, Homo sapiens
cacagaacccaagaaggagggccaaggcagcgcagagaggccacggaagcacagccaaggaagacccccccgaccccg

SEQ ID NO: 247899 - RNA, 88 nt, Homo sapiens
gcgggggccggcaccaggagcaccagcccgggacccacaggcggagaagagggacgcagggcgacagacaccagcccaccccaccaaa

SEQ ID NO: 247900 - RNA, 77 nt, Homo sapiens
cgaggccaccaagaaggccgcaacagaaggcagccaggcccgagcagccggacacgccggcggcgcggcagggaaac

SEQ ID NO: 247901 - RNA, 78 nt, Homo sapiens
gcggggcggcggcaacggggcacgaccgggggaggcacggacaaaacgcagggccagcaaacccgggcccaagacgca

SEQ ID NO: 247902 - RNA, 58 nt, Homo sapiens
acaacccgacccgacgaggcaagaaggaacagacaaaaacggccggaaggaaacacag

SEQ ID NO: 247903 - RNA, 77 nt, Homo sapiens
ccagaaggaaaaacgggagggaggaccggccagcccccccaaaaaggaaagacaccggcgggcagaacaagaagggc

SEQ ID NO: 247904 - RNA, 79 nt, Homo sapiens
gcgccaggagacgcaggcggaagggcccaggacccccagggcaaacggaagaacagcacagggcagcgagaggagccag

SEQ ID NO: 247905 - RNA, 74 nt, Homo sapiens
agcccgggacagcaacgcaccgggaccaagcccacgacaaggaaggagaagagaacgccagcccggcaggagcc

SEQ ID NO: 247906 - RNA, 75 nt, Homo sapiens
accgccgaccgaagccgcaaaagagcgaagcagcaggggacgagaggcaccagaaacggcggacgaaaggacggg

SEQ ID NO: 247907 - RNA, 77 nt, Homo sapiens
ggcaccacaaaaaggacagaacagagaacgaggaagaaaaggaaacccaaaaagacaaggccaagcagcaaaaccac

SEQ ID NO: 247908 - RNA, 58 nt, Homo sapiens
ccgcaccagccgcgccgccgccgcagcggcggagaaaccaccacaaacacgaggccag

SEQ ID NO: 247909 - RNA, 85 nt, Homo sapiens
caaaacggaagaacccaccgcccccgacacggggcgacacagcggccgagagacgcaagaagagaaggggaaccgacgaaagaaa

SEQ ID NO: 247910 - RNA, 79 nt, Homo sapiens
ccccccccagagggccgacccccacagaccacagcaccgggaagccagcagcggcagagggcggggggcaccgccagac

SEQ ID NO: 247911 - RNA, 42 nt, Homo sapiens
gagccgagagacagacgagacagggaacaaaggcagagaaac

SEQ ID NO: 247912 - RNA, 84 nt, Homo sapiens
cgcacgaggaggcggcggccgacggggcggcgggagcaggcgcccggccaggagagggaccagagggagcggaagcccgagagc

SEQ ID NO: 247913 - RNA, 70 nt, Homo sapiens
cgcaccgcaggcagacaaaagggccaaagaagggagagagccagccaggggaagcccccccaagaagggg

SEQ ID NO: 247914 - RNA, 80 nt, Homo sapiens
aagagcccagaaaacagccaccaacagagagaccaagacacccaggagaaagacagcggggaaaagaaaaaggagggggc

SEQ ID NO: 247915 - RNA, 70 nt, Homo sapiens
gaaggaacgcgacggcggcgcccgcaggggaaccagaagaggccaaccagcacgaacgccagcagcacgg

SEQ ID NO: 247916 - RNA, 40 nt, Homo sapiens
cccgggcacccgcggaccaggccgccgccgccaggaacca

SEQ ID NO: 247917 - RNA, 82 nt, Homo sapiens
cggggcgcgggcgcaagcaggcggcgggggccgcgaccaggacgaggacgcggcccagagaccccccacgggaacggaagca

SEQ ID NO: 247918 - RNA, 81 nt, Homo sapiens
gagaaggggagaggacgacgagaagcaggaggaggaggagaagaaggaaacgaggagaggagagacgaggaagagaagaag

SEQ ID NO: 247919 - RNA, 79 nt, Homo sapiens
gcagccgagcgcgcgagccagacagacgcgagcgacaagagaaggaggaaaggccagggcccagcagcagcccacgggg

SEQ ID NO: 247920 - RNA, 72 nt, Homo sapiens
ccggaggcgcagcgccaagagaagagcccacagccccgccggggggagagcgcaggcccacgggcgccgcac

SEQ ID NO: 247921 - RNA, 57 nt, Homo sapiens
gcacgagcagaccggcccgaccgcccacagacccaaacaaaggagggacgcccggag

SEQ ID NO: 247922 - RNA, 82 nt, Homo sapiens
ggccacgcaccgagccgcgcggccagagagcagaacaccggaagaaggcggccggccaggggagagcgcaacccaagggcca

SEQ ID NO: 247923 - RNA, 70 nt, Homo sapiens
ccccccaaacagccccgggccagcagaacacgaagcaaaggggaacaaaagagaagaaggaaaaggaaaa

SEQ ID NO: 247924 - RNA, 76 nt, Homo sapiens
gcccaaacgggagacaacccccgaaggaggaccccagaggagcaccccaaccggagcccagcaccagcccagccca

SEQ ID NO: 247925 - RNA, 71 nt, Homo sapiens
aagacgcacgcgaacaaaagggcgccggcggcagagcggggagacgagacaaccgccccgccgccgggaaa

SEQ ID NO: 247926 - RNA, 55 nt, Homo sapiens
aggaaaggcacagaaagaggcgcgggagaaaaggccggagacgcgggaagaagga

SEQ ID NO: 247927 - RNA, 67 nt, Homo sapiens
aacgcccgcggacgacccgagccgagacgggccccaagaaggcaaaccggacggcagggaagcggaa

SEQ ID NO: 247928 - RNA, 88 nt, Homo sapiens
cggcaaaggcggaccgacaccacgacgacgggccacagcagccggcggcggcagaggggacaagaacccaagaaacaggaaaaaaccc

SEQ ID NO: 247929 - RNA, 58 nt, Homo sapiens
aggaggaaaggaggacgaggccaccggagcccacaagcgcacccacgggcgggacacg

SEQ ID NO: 247930 - RNA, 81 nt, Homo sapiens
ccacaggcaggcccagaggccccgcgcccaggaagccaggagaccacccggcaagagacccccacaggcgcgccgagaccc

SEQ ID NO: 247931 - RNA, 75 nt, Homo sapiens
gagcaacccccgggaagccaagccgcagggcaaaaccccaaggcaacagcaaacacccgggccagcaccagcaag

SEQ ID NO: 247932 - RNA, 38 nt, Homo sapiens
ccccaggagcgggaacagacaaaagagaacgaacgcag

SEQ ID NO: 247933 - RNA, 70 nt, Homo sapiens
acagcacccggcagcgacgcacaaacgcccccggaaaagccagagacgcgcacgaaacgacgaagaggcc

SEQ ID NO: 247934 - RNA, 85 nt, Homo sapiens
agcagacgcaaggagcagccagagacagaaggaaagcgccgggccgcaagacagcccgggacaacaccgagggggagacaaggga

SEQ ID NO: 247935 - RNA, 55 nt, Homo sapiens
ggcgccaccagcaaccagagggccagagggaaggacaggcacccacgaggcggcg

SEQ ID NO: 247936 - RNA, 75 nt, Homo sapiens
cggaccagggacccgcgaaagcggggcacaggcgggcacgcgcccagggagaggagaacggccacggcccaagga

SEQ ID NO: 247937 - RNA, 76 nt, Homo sapiens
gaagaggcccacccggagaaccccacggagaaccagagaacagcagaaccaggcggagaagaacagagaaaccggg

SEQ ID NO: 247938 - RNA, 75 nt, Homo sapiens
ccagagccggcggagcagggcagcaccacgagccagaagcagagccgcagcaagagcaccgcgacccacaaccgc

SEQ ID NO: 247939 - RNA, 75 nt, Homo sapiens
cacacgggcccacacgggggaggcggccccggcagcagacacagccacgcacgaccggcccgggcgcgccaggca

SEQ ID NO: 247940 - RNA, 65 nt, Homo sapiens
aagcacaggaggccagcgggccgaggagaggaggagacccacccggggacgagccgccccagaag

SEQ ID NO: 247941 - RNA, 79 nt, Homo sapiens
aaagggaagggagccgaagggacaggcgcaggaagaagaagggacacccacagcacagggaagagcagcaaggcgaacc

SEQ ID NO: 247942 - RNA, 88 nt, Homo sapiens
agagcggaagacacacggacagcacagccaccagcaggagccaggagaaagacagcaaagaaaaggagaagaaaggaaaaaaacaacc

SEQ ID NO: 247943 - RNA, 77 nt, Homo sapiens
gcaggaaccacaacccaaccaggagggaaaacagcccccggccgggaccaggaggaacaagagaaggcccgacagag

SEQ ID NO: 247944 - RNA, 76 nt, Homo sapiens
ggaacccaggaaagccaccaggggagcagagcccgaaagaacagcaagaaagggccagggaaaacacaccaaacag

SEQ ID NO: 247945 - RNA, 62 nt, Homo sapiens
gcgaccggcgcccgcccgcgaaagagaagcccagcgagggggagagaagacggagaccagcg

SEQ ID NO: 247946 - RNA, 64 nt, Homo sapiens
acccgccacccagagaccccaaaggcacccgcgagcgcaacccaaggaaaccaagcacccaaaa

SEQ ID NO: 247947 - RNA, 60 nt, Homo sapiens
ccgacccggcccgaggggaagcagccaggggggaccaaggcaacgaacacaagcagcggg

SEQ ID NO: 247948 - RNA, 70 nt, Homo sapiens
gagcaggccggaggcaccaccggaaggcgaaaaacacacaaggcgcaaaaaccagacaccccacaccacc

SEQ ID NO: 247949 - RNA, 72 nt, Homo sapiens
caggccaacaacccaagggagcgcacgacccacgcggaacggggggagaggaggcaagaaaagagggaagcc

SEQ ID NO: 247950 - RNA, 77 nt, Homo sapiens
ggaggcagagcggcgccagcgggaccagcgacgacgcagaagagaggcacagagagaaagaaggaaaaagaacgacg

SEQ ID NO: 247951 - RNA, 88 nt, Homo sapiens
gcggaggcagcggcggaggagcgcgagcggcggccgcccggggccgcgggaaggccgaccgacgccgcgaggcggggacggacagcca

SEQ ID NO: 247952 - RNA, 86 nt, Homo sapiens
gggcggcccacaaccccagaaaggcgcaggcccacccagcaagaggagccaggagcacggggggaacaagaccgccgggacggaag

SEQ ID NO: 247953 - RNA, 69 nt, Homo sapiens
gaccacggcccggagagagcacgcccaccgcgccggagccaaagagaaaccaggcggggaacaagccag

SEQ ID NO: 247954 - RNA, 71 nt, Homo sapiens
gcgcgcgaggagaggccggggcagcagggccccgcccccgaaggacaggggcgaagaagaaccggacaggg

SEQ ID NO: 247955 - RNA, 78 nt, Homo sapiens
cagaaccccaaggaaagagaacgaacgaaggacgggggaggcaaggcagcaccccgacgacaagacaccccgagacaa

SEQ ID NO: 247956 - RNA, 74 nt, Homo sapiens
caagcggagagcccacgacaaccaccaagcgcggacgaacaggcgggaagaggcgcgaacagggcccacccgcc

SEQ ID NO: 247957 - RNA, 84 nt, Homo sapiens
cgcgggccggcgagcgcgcgccaccagccagcgcccggccccaaagcgaacgaggccaacccaagggagcgagaagcacgcacg

SEQ ID NO: 247958 - RNA, 84 nt, Homo sapiens
gccgggcggagcgcccagacgcggggagccgccggagcgagaagcaaaccaagaaggaggggaccgaagcgccaggccggcgaa

SEQ ID NO: 247959 - RNA, 72 nt, Homo sapiens
caagagaccaacagagcagagaaggccaagcccaacaggggacaccggccagggcccggacgggcaggcgag

SEQ ID NO: 247960 - RNA, 76 nt, Homo sapiens
ggcgccggccgcggcgcaggaggagccggagagcagccaaggggaagaaagcacagggaacaccagaggcgggacc

SEQ ID NO: 247961 - RNA, 86 nt, Homo sapiens
gggagagacgccgaacgacgccccgcacaccggagcgcccagcgcgaggagaaacggcgaggaaagagaggagccccggaaagaaa

SEQ ID NO: 247962 - RNA, 93 nt, Homo sapiens
gagacaagaggcacagaccgcgggagcggagcaaaggccgcaccagcgccagcggagaaagggagaccgcgagccgaggcaccggagaacagc

SEQ ID NO: 247963 - RNA, 59 nt, Homo sapiens
ccccgagagcgagacacagaccggcggcacacggacaaccgggcgaggggcagggacca

SEQ ID NO: 247964 - RNA, 80 nt, Homo sapiens
gggaccagcaaggcaggcgacgcccaggcccagcagggcagcggccacacacagacggcaagagaccgcccagcccccga

SEQ ID NO: 247965 - RNA, 54 nt, Homo sapiens
acagccagaccaggccagcgggccgggccagccgagacagaagcgggcggccac

SEQ ID NO: 247966 - RNA, 47 nt, Homo sapiens
agcgcaggcagcaggccacggaaccgcccagccccaagccccgccac

SEQ ID NO: 247967 - RNA, 54 nt, Homo sapiens
ggaagggcgacagcgcaaggagacgaagaacagcggcagcgaaacagaacagaa

SEQ ID NO: 247968 - RNA, 78 nt, Homo sapiens
agcggccgcgcacccccggccggaggcaccagcgcggaagcccggccgcgcaaaacgggcggcccgcgcggaggccgc

SEQ ID NO: 247969 - RNA, 81 nt, Homo sapiens
ggaccccgcggcgggaggagccgccccgaggaaagcgcacggcagcagcaaaaccacagagaaacggcccaagagaacagg

SEQ ID NO: 247970 - RNA, 73 nt, Homo sapiens
ggccaagaagacacaaaggacggaggcacggccgaacggccacagggacaggaacccacaggggaagagacac

SEQ ID NO: 247971 - RNA, 75 nt, Homo sapiens
cacgcgcaaacccaaaccccgcccccggagagggaacagaagggaggaaacaaaagaagcagcagcacgcacagc

SEQ ID NO: 247972 - RNA, 75 nt, Homo sapiens
gcgagaacgccgccgaacgccgcccgcacgccgccggcacagaccccaaagcacaagaaggagccacaacagcac

SEQ ID NO: 247973 - RNA, 84 nt, Homo sapiens
ggggcgcaggggccagagcgaggcgccccgcccgcggaccgcggcagcccagagcagacaacacacacgcacaagcgaaaccaa

SEQ ID NO: 247974 - RNA, 71 nt, Homo sapiens
cgcagacaagccaccacgcgggcgaacgcggcaccaccaggacagcggacaagagaaaaggaaaaagaaca

SEQ ID NO: 247975 - RNA, 83 nt, Homo sapiens
cacgaagccggcgcaccccacaccgacaccacggaggaggcggccggaggacccgggccccggggagcccccaaacacccccg

SEQ ID NO: 247976 - RNA, 74 nt, Homo sapiens
cggaaacagccacagcaggacagaacaaaacgaggaacaaaacagaagagggagaggaaaaagcgaaaagggaa

SEQ ID NO: 247977 - RNA, 73 nt, Homo sapiens
gcagaacagacaggccaagggcgcagagagggcggcggccacacggccgggacagaaaggaacagagacagac

SEQ ID NO: 247978 - RNA, 76 nt, Homo sapiens
gaggaacagcggggccgagaaacgcggaaaagaagaggcagagggaaggcagccaacagcgagaaggaaggaaacc

SEQ ID NO: 247979 - RNA, 77 nt, Homo sapiens
gcgcagcccacgccagacgaccccacccgcgccgcgacccgggccgcccacccaggcggaggcaggacacaggcagc

SEQ ID NO: 247980 - RNA, 54 nt, Homo sapiens
agaagcaagagaaagccggcagaacagccgccaggaagcaacgcagcgcggaaa

SEQ ID NO: 247981 - RNA, 75 nt, Homo sapiens
ccccaggcaccagcgccagccacacagacagcaggagccacgcaggaaagaagcagagagaaagaagaaggacag

SEQ ID NO: 247982 - RNA, 58 nt, Homo sapiens
aaccggaccaccccgaagaaagcacagaacagcgcgagccacaaggcaaggaagcagg

SEQ ID NO: 247983 - RNA, 62 nt, Homo sapiens
aggcgggggcgccggcagaggaccaggcaccaccggccccggaaggagccgcccggcaaagc

SEQ ID NO: 247984 - RNA, 63 nt, Homo sapiens
agcggccaaagccgcccagacggccaccggcgggaggaacaaaaggacgcggcgcgcaccggg

SEQ ID NO: 247985 - RNA, 85 nt, Homo sapiens
gagaacaccggacagcacggcgaggacgggaaggaggccggcacgaagaccgcccacagaaggccgcgccccccagagaggagaa

SEQ ID NO: 247986 - RNA, 71 nt, Homo sapiens
gaacaagaggggacagaaagccgagacagaagcgggcggccacggacacaacaagggccagcaggacggcg

SEQ ID NO: 247987 - RNA, 72 nt, Homo sapiens
ccgcgcagcgcggcagaggaggagcagcgcggaggaggaagccccccggccagaacaccggacgcaccgcgc

SEQ ID NO: 247988 - RNA, 82 nt, Homo sapiens
ggcccccacacagcgaagaaccaggaggaacacggaggacccaaaccgaacaaggcaccaagaagcacagcagggcccagca

SEQ ID NO: 247989 - RNA, 63 nt, Homo sapiens
cgccaggccacccgcacccccacccaggaggcgcgcccaaggcgggccccgaagaaacgaaga

SEQ ID NO: 247990 - RNA, 76 nt, Homo sapiens
gacacgccggacccccccggcaacagcaagagaaaagcccacagaagaggggccgaggcagcacacagaggaacac

SEQ ID NO: 247991 - RNA, 76 nt, Homo sapiens
aaaacgcgccaaaccgggcaaaaccagaagcgagagaagagcgaaagccacagaaaacgcaagagaacagaaacga

SEQ ID NO: 247992 - RNA, 70 nt, Homo sapiens
cagaacacagcggacccagaggacaaagcagcagggaggccggggcccgcccgcgggcgggcaaggacca

SEQ ID NO: 247993 - RNA, 76 nt, Homo sapiens
cgcacacacgacaggagaaaggagcggcggagaaaccaccacaaacacgaggccagcaacgaccaacaagacagac

SEQ ID NO: 247994 - RNA, 63 nt, Homo sapiens
caagcaaacagaagcgcggccaagagccaaagcagacccccaagcgagcggagcggaaggagc

SEQ ID NO: 247995 - RNA, 74 nt, Homo sapiens
gcgccaggaccgccaggggcgacggggcagagaaggcaaaccgagccaagggcagcagcaggaacaggaacagc

SEQ ID NO: 247996 - RNA, 74 nt, Homo sapiens
aaaaaagcagaagaagcaaacagccagacagccagcgcaacagaccgaagccaccaagaagaacagcagcagaa

SEQ ID NO: 247997 - RNA, 89 nt, Homo sapiens
acaagccagacaaaccgacaagccgggaagacaagcagaccccccagaggggcgaggaagccgcagagccccggaggacacaccagaag

SEQ ID NO: 247998 - RNA, 63 nt, Homo sapiens
gcgcgagacaacgccgcaagcgaccaacgggagccgcaaggacaacagccgcggccagacagc

SEQ ID NO: 247999 - RNA, 43 nt, Homo sapiens
gagccgcaggcgccacggccgggccaccagcgggcccccacgg

SEQ ID NO: 248000 - RNA, 97 nt, Homo sapiens
agccacgaaagggggccgagagcggagcgcaggacagcgcaggagccccggcgcacgcggcgcgcacagacccagggccagaagcccccaggaggag

SEQ ID NO: 248001 - RNA, 69 nt, Homo sapiens
aggaagacaggaacagcagcaacgcggaaggaagaacagaaacacgaccaaccagaacgcaaagcagag

SEQ ID NO: 248002 - RNA, 54 nt, Homo sapiens
aggaggaacgaggaaaaagaaaggaacaacaagagcagagggaaacccccggaa

SEQ ID NO: 248003 - RNA, 70 nt, Homo sapiens
ggggcccaaacagcagaggggcaggaccggagaggaaagccacaagggcccgagacccgagaccaaaaga

SEQ ID NO: 248004 - RNA, 108 nt, Homo sapiens
ggagaagaggacaaaaaaaaggcaaagacgggagcagacaacagccagcaagacgcaaaacaaaaggggccaaggacgcacacaccagagaaggcagaccaagggcga

SEQ ID NO: 248005 - RNA, 48 nt, Homo sapiens
ggaaggagacgcgcagcacgcggaccccccaaagacacacggacccac

SEQ ID NO: 248006 - RNA, 76 nt, Homo sapiens
gcagcccccagagcgggaccacaggccaggaagaagcaaaggaagacagaaaagacgccaccccagcccgacacca

SEQ ID NO: 248007 - RNA, 79 nt, Homo sapiens
gggaccggaaaaaagcacagaagcaagaccaaaaccaagaggcagacccaaaaggaaaacagcccgcccagagaggaca

SEQ ID NO: 248008 - RNA, 82 nt, Homo sapiens
gaccgcgcgccgcccaagggggaccgccggccgcgagccagagagcccgagggaaaagacaggcaacaggaaagcaagggaa

SEQ ID NO: 248009 - RNA, 62 nt, Homo sapiens
acaggaggcaaacggagccagaaggcagcgggcaggaccccacgagggaaccaagacaggga

SEQ ID NO: 248010 - RNA, 56 nt, Homo sapiens
ccgccggcgcgccccacgggccaggagggacccaaagacaggaccacgcaccagca

SEQ ID NO: 248011 - RNA, 62 nt, Homo sapiens
cgggccggaacgaaagcaggacggaggagcgaccaccggccagagagaaggcgcgagggcgc

SEQ ID NO: 248012 - RNA, 77 nt, Homo sapiens
aaaagggacggacaaaggaacaggaccaggagggaaaaccccgaccaaaagaagcaggacacaggagaagcgagaac

SEQ ID NO: 248013 - RNA, 84 nt, Homo sapiens
gcaagcgagccagagcccacagaagcaggaaggaaagcgcaggcaggagaaggacagcagagccacaagggacgcaaaaagaag

SEQ ID NO: 248014 - RNA, 85 nt, Homo sapiens
aagagccagggcccgaccgcagggagcagaggggacagaggcaccaaggaccccaagacagccggcaagagcaggaagaaaaagg

SEQ ID NO: 248015 - RNA, 85 nt, Homo sapiens
cagggaaccaggggccgggcagagcggagcggagcgcgcgcccgccccgccgggaggaccgcgagggccgcaagcagggggaaca

SEQ ID NO: 248016 - RNA, 69 nt, Homo sapiens
ccgagcccaggagcgccacgcgcggaaggcagcgcccagcagcgcaggcagggagcggggaaggaaagg

SEQ ID NO: 248017 - RNA, 71 nt, Homo sapiens
aaccaacgacacgacgaccaccagacgagacacgcgaagggagggagcaacgcgagccaagcagcaggccc

SEQ ID NO: 248018 - RNA, 116 nt, Homo sapiens
cgggcggcgaccgcagggacggcagacccgagcaagacgccaggaccggaagcagagaaagcacacgggggggcccacgaccgagcggccacaagggcgccaacaaggggccaaac

SEQ ID NO: 248019 - RNA, 78 nt, Homo sapiens
ccggccgcaggagggagaccacagcaagacaccgggaccccggaagccaaaaaggggaaaaagaaaagggcgaagacc

SEQ ID NO: 248020 - RNA, 67 nt, Homo sapiens
cgccggacgggagcaagcgacccggccggacccaccgaccagggcagacagcaaaggaaacagaagc

SEQ ID NO: 248021 - RNA, 54 nt, Homo sapiens
acaaaaaaggaagcgaaagcccaaaagcaccggaaaacgcaggcgacaagaaag

SEQ ID NO: 248022 - RNA, 71 nt, Homo sapiens
acaggaaaacgagggcaacgcagcaagacacgaagacgccaccggagagagaaaagcaaccgaaggggaaa

SEQ ID NO: 248023 - RNA, 54 nt, Homo sapiens
agcaagaaagggaaggagggcggaagccaccaaaaccagggaaacaggagaaac

SEQ ID NO: 248024 - RNA, 76 nt, Homo sapiens
accgcacgacgcaaggacccacagaccgggggcaaaagagacggacaagcaaggcaggagaaagcaagcaagccac

SEQ ID NO: 248025 - RNA, 63 nt, Homo sapiens
agccggagcagggcaggggaggaagaggacaggcacaagcccgaccaagaaaacaaaggcccc

SEQ ID NO: 248026 - RNA, 77 nt, Homo sapiens
agggaggcggagcagggcaacaaggagcgcgcagaaacgggggagcccagagaagagagccagaggccacaaccgcc

SEQ ID NO: 248027 - RNA, 62 nt, Homo sapiens
aaagcccgggcaaggggacgcgcagcgacggacaaggcaaaaccagcaagcggacccagaca

SEQ ID NO: 248028 - RNA, 92 nt, Homo sapiens
gaagaggcggagggggacgggggcggcccagaagaggcggaggcggggaggcccacgcggaccggcagcgccaccggaccaccagacaagga

SEQ ID NO: 248029 - RNA, 71 nt, Homo sapiens
ccaaggccagggggcagagccgaagaacacaaggaggcgagagaaagaagccccgggcacagcagcaggac

SEQ ID NO: 248030 - RNA, 80 nt, Homo sapiens
aaacgagcacaggaccacaaacagcaacacagaacgcaagaagcgcaccacgacaaagaagagaaaacgcggcagagcaa

SEQ ID NO: 248031 - RNA, 64 nt, Homo sapiens
cgccacccccacccgcacaggaccaaggaccacaccacggagccaggaggaagccaggacacgg

SEQ ID NO: 248032 - RNA, 67 nt, Homo sapiens
ggggggccagcggaagaaccccccgggagccagaccggcaccgaagaccagcaggaggaagaccgcc

SEQ ID NO: 248033 - RNA, 73 nt, Homo sapiens
aacaaacgaagaaaaaaaaccccccaaaggaaagaagcccgaacaccccgcaaagcaccggacagggagagcg

SEQ ID NO: 248034 - RNA, 73 nt, Homo sapiens
agacaaccggaagcggcagagagggaaacagacaacacaccaaaggagacacccagccacaccccaccgccca

SEQ ID NO: 248035 - RNA, 59 nt, Homo sapiens
ccgcccggagagcagagcaacacggagggaaaccggcacagggaagagaaacagagaaa

SEQ ID NO: 248036 - RNA, 70 nt, Homo sapiens
ggccgagaaggcagaggcggcccgccaagcgcccccgggcacgagagcggacgagccaaggccgggagga

SEQ ID NO: 248037 - RNA, 82 nt, Homo sapiens
gaggcggcggagcgcgagagccgagcggaccagccccgcagggagaaaacaagaaaaccaccccagcaccacccccccaaga

SEQ ID NO: 248038 - RNA, 76 nt, Homo sapiens
ccgccccccaggcagggaacccgggcccgccgcgccacggccgcggagggaacccgggccccgccccccacacaga

SEQ ID NO: 248039 - RNA, 77 nt, Homo sapiens
ccagaacacccacacacagaggggaaagacccagagaagagacacaagaaaccaagggaagggcgaagacagcaccg

SEQ ID NO: 248040 - RNA, 90 nt, Homo sapiens
gccggcccgagcgggccaccgggcccgggcgggggcggcgggacaccagacacgaaggaccacaggccccggaggggggacagccaggcc

SEQ ID NO: 248041 - RNA, 44 nt, Homo sapiens
acacagacagcgaccacacgaggcccagcgagagccagccggag

SEQ ID NO: 248042 - RNA, 71 nt, Homo sapiens
ggaaaagggagagagcgggccagcaaacccgcccgagggcaccacgccaccgagagagccgaggaaaagga

SEQ ID NO: 248043 - RNA, 64 nt, Homo sapiens
aggagaagcgaagagcaaccagcagcagggcgagcacccccagccagcagaaacagagacccca

SEQ ID NO: 248044 - RNA, 88 nt, Homo sapiens
cagggggacccaaccagggggcaagaagaaggaggggaaccggagagccagaagaccggaccaaaccagagacaaaaggcacagccag

SEQ ID NO: 248045 - RNA, 74 nt, Homo sapiens
cgaagaagaggcccaacccccaccccgcccaaggaggcccagcgaagagagaagaagcaaaccgggaccggaag

SEQ ID NO: 248046 - RNA, 59 nt, Homo sapiens
ccaaaagaagaaaaggaaagccagcgaaaaggccaacagcccaaagggcacagaacaga

SEQ ID NO: 248047 - RNA, 80 nt, Homo sapiens
acagcagaggccgagaaacagagagaaaagagacggagcaagagaacgcaagagacggccagcacagcaaggaacccgag

SEQ ID NO: 248048 - RNA, 69 nt, Homo sapiens
gcaaacaggcggggaccggcgaggagcgaagaacaaacacccgagcgcgaggaaacgggaagaaggaag

SEQ ID NO: 248049 - RNA, 91 nt, Homo sapiens
gccgagacaaaggcaccaggccaccacagaaacaaaagcaacaaagagggaggggcagcagcaggacagggaacccgggagacagcaacag

SEQ ID NO: 248050 - RNA, 76 nt, Homo sapiens
ggagagcccagagcgacccccggccaccgggcgggagaagcggaggcagacgcgcccggagaaggacagcagcgaa

SEQ ID NO: 248051 - RNA, 65 nt, Homo sapiens
agaagaagaagaagaagaggacaccaggagacgagaggacagagcgagacgccgccgcagccagc

SEQ ID NO: 248052 - RNA, 84 nt, Homo sapiens
agcccccccacaccgaccaacgggaacccccaaagaaggaggagacgagcaagaaggccgggagaccaggagcagggccagggc

SEQ ID NO: 248053 - RNA, 79 nt, Homo sapiens
cgcccgggcccgcgcgagccccgggaaagagcagcgacgggagacagccgggcgcgcaagagcaaaagaagagcccaaa

SEQ ID NO: 248054 - RNA, 80 nt, Homo sapiens
cggccagcaggggaggaaaagacacacccgggaaacggagagaaccagagaaaaccaccaaaggccaggaagagccagcg

SEQ ID NO: 248055 - RNA, 88 nt, Homo sapiens
cgggaccgccccgggccacgcggaagcagccgcccggagaaacagacggggaggagaaccagccaggcggcagcccggagaggacaag

SEQ ID NO: 248056 - RNA, 64 nt, Homo sapiens
acacagcgaagaaagaagaaaaacgcccaacgaggcgaaagagccaccagaggcagaggaggac

SEQ ID NO: 248057 - RNA, 50 nt, Homo sapiens
gaccagccacaagaacaggaaacacggggaacggccaggccgcgcaggca

SEQ ID NO: 248058 - RNA, 76 nt, Homo sapiens
cagacacacagcagaccaacccagcgcaccccaggcaacccaaacgaggacaccccggagccggacggcccaggaa

SEQ ID NO: 248059 - RNA, 77 nt, Homo sapiens
ccggacaccaacccgccaccgggagcagacggcaagaccaagggaacggaagccccagcccgcgcgagccaggcgcc

SEQ ID NO: 248060 - RNA, 60 nt, Homo sapiens
cacagcggacagccagcaaccaaccagggcacccagccggaggggggacacccccggggg

SEQ ID NO: 248061 - RNA, 76 nt, Homo sapiens
ccgacagagacggcggagaccccgaaggcgcaaacgacaccacccgaccgggggcagcacgccgaaggagagacca

SEQ ID NO: 248062 - RNA, 84 nt, Homo sapiens
aggagcccagccacagccaccggacccccaggggaacgaaacgcacacccggccccagcagccacagcggaggccccaaggaca

SEQ ID NO: 248063 - RNA, 78 nt, Homo sapiens
ggagagccgacgaggcgagcgaccaggaccggccggggcgggcagcgcgggagcgagggggaaaagcaaaagcagagg

SEQ ID NO: 248064 - RNA, 75 nt, Homo sapiens
ggagacgcccgccaggcacacgcggccgcccggccgggaaccaaggcgcgacgagaaaccaaagaaaaaggaaac

SEQ ID NO: 248065 - RNA, 69 nt, Homo sapiens
gaaacaagcgacgccaggaccggcggccagaaaacaagaagcagaaccgcggaaggaggaacaagcaac

SEQ ID NO: 248066 - RNA, 103 nt, Homo sapiens
gaaaaaaccagagaccacagaaggacgggagaacaccccacagggaagagggagaaagacgcagaaagaggggcaaaaaagagcacaaagcgccgcgggggag

SEQ ID NO: 248067 - RNA, 80 nt, Homo sapiens
ccaaagacaagacgcaggagaaaacgagacccaagaacacccaaccagaggagcagccaagaagccccccaggggcccgc

SEQ ID NO: 248068 - RNA, 74 nt, Homo sapiens
ccggcccgagcgcaccggagggacggcacagggaggccagccggagaagcgagcagcgagcgcgacagagggag

SEQ ID NO: 248069 - RNA, 72 nt, Homo sapiens
ccgacaagggaggaaagagacggagaggaggacagcaagcaaaacagcgccggccgggggaagcgggcaaga

SEQ ID NO: 248070 - RNA, 85 nt, Homo sapiens
cacccgggacccggcgcaggcaggcggaggaagaagccacccgagcggaccccgaggaaacaccacgcgaagacaaaaaaaaagc

SEQ ID NO: 248071 - RNA, 80 nt, Homo sapiens
agacggagcccagagggcacagaagaggcgagccaagacacaccccaaggaagggaccacagaccagcacgccggcgcca

SEQ ID NO: 248072 - RNA, 83 nt, Homo sapiens
gggcaaggacagaccacggaccgcagcgcaagacacgccaagaagaggacacgggaacacagaggagccaagcgcccgccgga

SEQ ID NO: 248073 - RNA, 70 nt, Homo sapiens
gcaccgaacaccacaccccaaaagacaacaggcacaaagagagaaggaacacccacagggcagacagaga

SEQ ID NO: 248074 - RNA, 66 nt, Homo sapiens
gacagagggagccaggcagagcccgccaggagcccggaaggggccgcacgagacagaaagacacac

SEQ ID NO: 248075 - RNA, 77 nt, Homo sapiens
gcgccccccaccccaccgccaccgaggcccccccgccccccagggcagagacgcgcaaagcggggaggagcacaggg

SEQ ID NO: 248076 - RNA, 65 nt, Homo sapiens
agcaccccaacggaagggcgcacacaaggccacgaggagggcacgcggaggagacgaagaggagg

SEQ ID NO: 248077 - RNA, 90 nt, Homo sapiens
ccccgagggcgggacacagaaagcggagagggccgccggacaagaccacaggcggaccccaagcgcagcaacgccacaacacggccaacc

SEQ ID NO: 248078 - RNA, 66 nt, Homo sapiens
agaggagaaagaagcccagcccaccggagacacaggaacaaacgagcacgcaacagaaggaggcag

SEQ ID NO: 248079 - RNA, 80 nt, Homo sapiens
aacgccacgacaccggcacccagcaccacccggaggagaccggcagcagggagacagaagaggacgaggaagagacccga

SEQ ID NO: 248080 - RNA, 80 nt, Homo sapiens
gaaaaggaaggagagaagagagccgcagggccgaggcagccaggcgcccagccggaaggcaggcgaagccccacccacaa

SEQ ID NO: 248081 - RNA, 66 nt, Homo sapiens
gcgaaccgcggggcagaagagacaagcaacagaagaaagaaggccaccccagagaagaggacgaga

SEQ ID NO: 248082 - RNA, 73 nt, Homo sapiens
accccgccccgcagcaacaagaggcggcagcccgagaaccggggacccgaaaaaaggggaaccagaaagacaa

SEQ ID NO: 248083 - RNA, 57 nt, Homo sapiens
ggacacaacgcgccacgaaggccaggccagggagccaagcgaaagacagaggcccag

SEQ ID NO: 248084 - RNA, 80 nt, Homo sapiens
aaggccaggcagaaagcggacgacacggacaggaagaaacaagcgagaggaagcacagcagaggagggagcacaagccgg

SEQ ID NO: 248085 - RNA, 66 nt, Homo sapiens
gagccagacacccgcaaaagagagacgcagaagaccgaaacaaggaccccccgggagaagaaaagc

SEQ ID NO: 248086 - RNA, 72 nt, Homo sapiens
aggggcgcggccggagcgggcggcgagacaaaggcgacgacaacggcaagcggagaagagcaaggccgaacc

SEQ ID NO: 248087 - RNA, 73 nt, Homo sapiens
accaccaccaggccggagaacgccccaaggagcaagcacccagggggaagaaggaaaaagcagcagcagggaa

SEQ ID NO: 248088 - RNA, 75 nt, Homo sapiens
accgagagcaagacaagaaagcggcagcccagaaccggaagcgaccacggacacaaacgccagagaagaaaaaga

SEQ ID NO: 248089 - RNA, 77 nt, Homo sapiens
gcggacagcccggcccccacgggaccaagcaacaggcagcacacaaggcaaccgcggagaaccgaaccaacagccag

SEQ ID NO: 248090 - RNA, 62 nt, Homo sapiens
agaaacacccggacaaagacccggaacagacaccaagagaaagaaggccgagaaagaacacc

SEQ ID NO: 248091 - RNA, 80 nt, Homo sapiens
cggcgcgggggagaggaggagccgcgggccgggcccaaagcacaagcgaccgccgaaggagcccccgaacggcaacgccc

SEQ ID NO: 248092 - RNA, 80 nt, Homo sapiens
gcaggggcgacgaaaccgcagaccagaacagacagaagagggacaagccaagaaacccggaacgaggaaaacacggagga

SEQ ID NO: 248093 - RNA, 65 nt, Homo sapiens
aggagagacacaaggcaaagagccagaagagagccagaaaacccagaaccagcacagagccgcac

SEQ ID NO: 248094 - RNA, 76 nt, Homo sapiens
gagagaagacaggaggacagcacagcacagccagggagaaagcggccacagggaccaacgcacaaaagcaacacaa

SEQ ID NO: 248095 - RNA, 74 nt, Homo sapiens
aacggagcccccaggagaaagcagcgaccacccagcgacagcaaaggaaggcagaaaggagagagaagaaaaag

SEQ ID NO: 248096 - RNA, 37 nt, Homo sapiens
ggcacgaccggccgcacgagagacaggggacacgaac

SEQ ID NO: 248097 - RNA, 70 nt, Homo sapiens
ccagaccaaaaaaaaaaaacaaccgaggggccgacccaagcacaccagaaagccaccccgcggaaggcgc

SEQ ID NO: 248098 - RNA, 102 nt, Homo sapiens
gaggccccgacagaacccaaaaacccgaccacgccaagggaagaaccccaggggcccgcgacgggcaggcagcagacccgggcaacaacgcagcacagccgg

SEQ ID NO: 248099 - RNA, 82 nt, Homo sapiens
cggacggccggcagggggagagcgccaccccaggcaaaacccaaggcggggcgcccggcccagagggaccgacgacaaccca

SEQ ID NO: 248100 - RNA, 84 nt, Homo sapiens
cccgcccggacagagcccgggcgcgcaggggcaaagaaaaaggagagaaaaagaggcaaaacaacaagaagaaaagagaaaaaa

SEQ ID NO: 248101 - RNA, 63 nt, Homo sapiens
agaccggaacacacaagccgccgccggaaaggaggcacgagagccccgcggaggcccgagcac

SEQ ID NO: 248102 - RNA, 72 nt, Homo sapiens
gaagcgggcgcgcgcacggcaggacggagacgaaacgagccagcacaaaccagaaaggacaccggaccaaag

SEQ ID NO: 248103 - RNA, 55 nt, Homo sapiens
ccaccgcacacaggacaaaaggggggagccgcacgacccgaacgccagagacaaa

SEQ ID NO: 248104 - RNA, 74 nt, Homo sapiens
cagacaaccagaagaaagaaaaaacaggcgcgccaggccgacgccgagaagccgcaagggcgggggaaacaagc

SEQ ID NO: 248105 - RNA, 77 nt, Homo sapiens
aagagccaaacaaggaaacagaagacggaaagacgggaagaccccagaaaaagaaagagcacgaacgcggagaaaga

SEQ ID NO: 248106 - RNA, 44 nt, Homo sapiens
gaggcaaagcaccccgcaagaaaacacagcagcacaaggagagg

SEQ ID NO: 248107 - RNA, 73 nt, Homo sapiens
ggccaccgcgcacccacgaacgcccaccccccgaacccagccgcaccgacaacgaagagaggaaagaagcgga

SEQ ID NO: 248108 - RNA, 58 nt, Homo sapiens
gggaccagaagaacaagaccaagagccacaggaccgcagaacaaagaagccacagaca

SEQ ID NO: 248109 - RNA, 76 nt, Homo sapiens
accggacgccacccggcaccgaccagaaggaggcccagggccgacgcggaccgcagcgagggcacccgggcacgga

SEQ ID NO: 248110 - RNA, 77 nt, Homo sapiens
acagcaagcgggagccccgggaaccagcgcccgccccccagccaagaaagacgggccgcaccgaaacccaacggaaa

SEQ ID NO: 248111 - RNA, 83 nt, Homo sapiens
gcaagcccacggaggacccccgcccgaaccgagggaacaggaaacgaaggcagcaaaaagaagagcagaaacgaaggaaaagg

SEQ ID NO: 248112 - RNA, 82 nt, Homo sapiens
cggggcaccggcagggcagacacaacaaggaaaaacgcagccccagagagcgcggcgaagacagaaaaggaccccaagaacg

SEQ ID NO: 248113 - RNA, 64 nt, Homo sapiens
gcaaaggaagcggagaaccacaaacaacgaagggcacacgaacgaaaggaaacacaggcccaag

SEQ ID NO: 248114 - RNA, 63 nt, Homo sapiens
cgacccggggcaacagcgagccgcgggaagggagcacacaacccagaaaagaaaaggccaggg

SEQ ID NO: 248115 - RNA, 86 nt, Homo sapiens
gcgaccccagcagcagccgccgccagagaggcccgcccaccagcgcccgcccccgccccgcacaagacgggccgcggagagcagcc

SEQ ID NO: 248116 - RNA, 76 nt, Homo sapiens
caccaacagccccaacccagaaagcagaggccagagcggagacagacggaaaagaccaggcacggacacggaggcg

SEQ ID NO: 248117 - RNA, 72 nt, Homo sapiens
gccggggcggaagaggcggcggccccgcgggcgccagcagacgaagccaggaaacggaccaaaaggcaggcc

SEQ ID NO: 248118 - RNA, 86 nt, Homo sapiens
acccgaggcgaagcgggaagcagcagcagaaggggaacggacgggcccacagcccggagccccacagcagacaggcagcaaagaaa

SEQ ID NO: 248119 - RNA, 56 nt, Homo sapiens
gccgcagacgcgaaggaacggcaaaggacccgagccccaaagacagaaaagccccg

SEQ ID NO: 248120 - RNA, 76 nt, Homo sapiens
gcccccaacgaggaaggaaaggagccgcccgcacccaggcggaggcaaggcggaccggcgcaccaacccgccccca

SEQ ID NO: 248121 - RNA, 76 nt, Homo sapiens
cggggcgggaacccaggggccggcacagcacaaaccaagaaccccaacaccaccaagcagaagacagcggacacac

SEQ ID NO: 248122 - RNA, 57 nt, Homo sapiens
ggcgggggcgccggagagggccaggaccaccgcggaagagaagaacgacgagaaggc

SEQ ID NO: 248123 - RNA, 72 nt, Homo sapiens
acccaggcggaaccaagccccagccggagaaggagcccacaacaaccacagggggcaccaccgcaccacccc

SEQ ID NO: 248124 - RNA, 75 nt, Homo sapiens
ggaccaggggcaacaggccggcgcccccgaaagcccaggaacacaaacagaagaagagccgaacgagacaaggcg

SEQ ID NO: 248125 - RNA, 55 nt, Homo sapiens
ggcggaaccaaagccagcagcaccaaccagcgaacggaggaaccacgcacagagg

SEQ ID NO: 248126 - RNA, 74 nt, Homo sapiens
acaagcggacgaaagggaagcgggcgagagaacagcggcagcgaaacagaacagaaggcccagcagcagacaac

SEQ ID NO: 248127 - RNA, 69 nt, Homo sapiens
cggcggcgggcgggagccccagagcaaggcggaaagaaggcggcacaagaaaagagaccagcaggagca

SEQ ID NO: 248128 - RNA, 80 nt, Homo sapiens
ccagagggacaacaggcaggagaaagggagcgcaccccagggaaaagcacacgccggacggaaacccacagccaaggggg

SEQ ID NO: 248129 - RNA, 68 nt, Homo sapiens
gcccggcagccccgacgcagccgggaagagaacaagcagaggaaagacacgccagagaagaacaggac

SEQ ID NO: 248130 - RNA, 79 nt, Homo sapiens
ggagagccagagcgcagggagcgccggccgcgagaacaaagaagagccaaagcccaggacggggaaacagcagagagca

SEQ ID NO: 248131 - RNA, 83 nt, Homo sapiens
gcagcccgacgcaaaccaaggacggggaccgcacacccaaggcaaaagcagaccggaaaacccaccggcaagaccacacccga

SEQ ID NO: 248132 - RNA, 85 nt, Homo sapiens
cagaaaccaccaacgacgcaacgacgcaccagacaaacgacggggaggaggcgggccgaagcggaaaagagaagaggggaggagc

SEQ ID NO: 248133 - RNA, 73 nt, Homo sapiens
agcgcgccacgcgcggcgcgccgcgaggggagcgcagcgggagcagaccaggccaggagacagcagcggaccc

SEQ ID NO: 248134 - RNA, 85 nt, Homo sapiens
cccggggcccccaaagccagagcccccaacccagggaggaaccgacagggagaccagaccaccagcccaccccgagcgggaggcc

SEQ ID NO: 248135 - RNA, 75 nt, Homo sapiens
ccacgaccccgccgcggcccccgcaaaacaagaaggacagggcgaaccccgcgccccgcagcggagagcgcggcc

SEQ ID NO: 248136 - RNA, 70 nt, Homo sapiens
cagcggcagcgggaggcgacaaagagcgaaagggcccaaggaacagaccaagcaggaaaaaagacgacca

SEQ ID NO: 248137 - RNA, 71 nt, Homo sapiens
aaggaggacaggagacgaccgagcagaacccccgaacagaacggggggaccacaggcagcagcacaaacca

SEQ ID NO: 248138 - RNA, 83 nt, Homo sapiens
acagaagagcgaagcgaggacacacccaggaaaagaccaggacggacaagcacagccggaaggaacgaggccaagccaaacag

SEQ ID NO: 248139 - RNA, 80 nt, Homo sapiens
gaacaaaacagccagagcaggcacgaaaagcagaaagaagacaaggacaaaaaggacacacaagcagagcacaaacccac

SEQ ID NO: 248140 - RNA, 65 nt, Homo sapiens
aacaggaagagagcggacagcaaggcgaggaagaagcgcagccagagagcgccggggccggggcg

SEQ ID NO: 248141 - RNA, 93 nt, Homo sapiens
gccagaaacgggccccgcgccaggaggcccaccccgccgggaaagcaccgacaggacccaaccccaggcccccccggggggcccggggcgggc

SEQ ID NO: 248142 - RNA, 78 nt, Homo sapiens
gaaaacaggccacggaaagaagaagagaagcgacgccccagccaaccccagagcgggccacaggaacgcgccgaaaca

SEQ ID NO: 248143 - RNA, 70 nt, Homo sapiens
ggaccggaagcacacaacaggaaaacaaaagaggagaaaggaaagccaggaggacgaccgcgaaccagga

SEQ ID NO: 248144 - RNA, 103 nt, Homo sapiens
ccagcagccgccggagccagccaacgagcgacgggaccccgaacaaccagcgagcgagacccgcagagcgcggacgccccaagccaaggagacaaccggggaa

SEQ ID NO: 248145 - RNA, 73 nt, Homo sapiens
gggcaacccgaccgaaccaaacgggcaagagaacccccaaaagcccgcaccggacgcgaaaggaccagaaggg

SEQ ID NO: 248146 - RNA, 67 nt, Homo sapiens
cccggggggcggcgcccacccgggaggacagagagagagggcgcaaaaacccagaaccacagccccc

SEQ ID NO: 248147 - RNA, 60 nt, Homo sapiens
ggaggggagcagaggaaccgacgacgggggccccgacgaccaaagcaaaaaaaaggccag

SEQ ID NO: 248148 - RNA, 74 nt, Homo sapiens
gccagaagaaggaccggaagcacacaacaggaaaacaaaagaggagaaaggaaaacaggaaaagccaaccggga

SEQ ID NO: 248149 - RNA, 77 nt, Homo sapiens
gacaggagaaagaagacagccacagaaaggaccggcggagcacgccgggggggagcacgacaccggaaagaagggga

SEQ ID NO: 248150 - RNA, 42 nt, Homo sapiens
ccggaggggacgaagaacggagcaggaggaggggggggccag

SEQ ID NO: 248151 - RNA, 70 nt, Homo sapiens
ccgagagccgcccgggccagcggccgcgcacccccggccggaggcaccagcgagccaaacaaaggaacgc

SEQ ID NO: 248152 - RNA, 87 nt, Homo sapiens
gagaccgcccagaggagaccgaggggccagacggaacccagagagacgacacagcagcaagagaagaggcgaaagaagagggaaaag

SEQ ID NO: 248153 - RNA, 93 nt, Homo sapiens
ggcgaccagacaacgccagcaagaacgaggaggacgcggggacgccacgacgggagcagcaagggaaccgcgggcccccacccccccgccggg

SEQ ID NO: 248154 - RNA, 58 nt, Homo sapiens
cggaagagggagcagaaacacagggagagacacagaccaagaacaagccagcaagagg

SEQ ID NO: 248155 - RNA, 75 nt, Homo sapiens
ggacgggggaacccggggccagagccggccaggcgccgcacccacaggaacgccgcggagcagagccagggcgcc

SEQ ID NO: 248156 - RNA, 83 nt, Homo sapiens
ccagcccaaaggcgaccgacaccgcccagcgaagagaggccagaaagacaaagaccaaaagacagacagaaggagaaaacgaa

SEQ ID NO: 248157 - RNA, 59 nt, Homo sapiens
cgccaaacgcaggcacaaggcgcagggggaaaggcggagcaggacccaaagaagccaga

SEQ ID NO: 248158 - RNA, 52 nt, Homo sapiens
agcaggagcagacggccgaggaaagccagcgggaccagccgcagcaagccag

SEQ ID NO: 248159 - RNA, 71 nt, Homo sapiens
cagaaggagagcccgaaaggccaccggcggcccacaaaggggagagcccaaggaccagggggggcaggcag

SEQ ID NO: 248160 - RNA, 76 nt, Homo sapiens
ggagaccggagaaaaagggagcagaagaggcggccacccacgagccgacggcaaacgccagggagccaccaagggc

SEQ ID NO: 248161 - RNA, 55 nt, Homo sapiens
ggcagaggcggcgcagcgcagcccgaggaccgcacaggcgcaggcgcaaggggcc

SEQ ID NO: 248162 - RNA, 37 nt, Homo sapiens
agcaccccccgccggaaagagccaccaaaaccggcaa

SEQ ID NO: 248163 - RNA, 76 nt, Homo sapiens
acgacccgacgaagcccacgccgggacccagcgcagccggccaagaacaagaaccccgccaccgcggagaagcggc

SEQ ID NO: 248164 - RNA, 53 nt, Homo sapiens
gccgaagcaccgcgggcgcgcgggacaagggagagacagagcgacagagagaa

SEQ ID NO: 248165 - RNA, 77 nt, Homo sapiens
gccgaccgggcggcgaggaaggcgccccgggggcacaagaaggccaaccccaaaagagagaacacaggcaagacgaa

SEQ ID NO: 248166 - RNA, 72 nt, Homo sapiens
aaaagcagaaaacacacagaggggccacaaacaggggacagaaaaccagagacgggcgcccagacggggaaa

SEQ ID NO: 248167 - RNA, 52 nt, Homo sapiens
caaggaggcaaggggacacaaagggccgggaaaacacaaacaagcgcggacc

SEQ ID NO: 248168 - RNA, 89 nt, Homo sapiens
cgcccagcccaaaccaggagagcgagggagcgagcgggcagcgcggccacagaaacacacagaaggggagcaagaggaaccacacaaca

SEQ ID NO: 248169 - RNA, 65 nt, Homo sapiens
cgaggcgcccgggagaagggggaggccccgcaaccagcagaaaacacagagaaaacacggagaaa

SEQ ID NO: 248170 - RNA, 76 nt, Homo sapiens
agccaaccaggggcagaacaggcccgggccaaaacagcaacccaaacacagaagccccggaggaacgcgcaagaga

SEQ ID NO: 248171 - RNA, 78 nt, Homo sapiens
caaacgcacagaaagagcgaacacccagaaacgggggaaaccacgggagcgacaggggcaggggccaagagaaaggca

SEQ ID NO: 248172 - RNA, 76 nt, Homo sapiens
ggaagcgagggcacgggcggcagcccgagaccgcagcagggcgacaggacaacggacagcaaaaaaggagagcaag

SEQ ID NO: 248173 - RNA, 83 nt, Homo sapiens
gcgcaaggagcacccggcggagcagagccagcccggggccgcgggcagcaggaagaccaacggggagccggggaagaggcgcc

SEQ ID NO: 248174 - RNA, 75 nt, Homo sapiens
caacgaacgaaaaaaccagaacacgccaaggcaacaagcagaaagcacagcccgaggacccacacaagaaaagcc

SEQ ID NO: 248175 - RNA, 85 nt, Homo sapiens
cgggacccagcccaggcggcgcggacggggcgggcccagcggcaaggacggcaccggcccgcggcggagagccgaccggacgagg

SEQ ID NO: 248176 - RNA, 73 nt, Homo sapiens
acagaccccggaccggcggcggaaagcggaacacggaacgcacagaagagcagagcaagcgacccggacaaaa

SEQ ID NO: 248177 - RNA, 66 nt, Homo sapiens
cagggcggagagaaaacccgcgaggaaagggaaggagcaagccgggccagcgcaggacaccagcca

SEQ ID NO: 248178 - RNA, 81 nt, Homo sapiens
cccacaaggcagcgccagaccccgaggagcgagacaaccgagcacaaaaaaggcacccggagaacagacagaccagccgaa

SEQ ID NO: 248179 - RNA, 81 nt, Homo sapiens
agcggggcggggcaggaacgaagcgaaagaaaacaagaagcagcaagcacccgcgccaccaaaaagaaagcgcaggagaca

SEQ ID NO: 248180 - RNA, 72 nt, Homo sapiens
ggaggccggcccgggcccgcgacccgcagggcccaggacagaaggcgggcaaggagcgccccccgagcaccc

SEQ ID NO: 248181 - RNA, 76 nt, Homo sapiens
aggggccccccggagggagaaggccaagaagcagcccgcacggcggaggagaaggaggcaccgaaccacaggggga

SEQ ID NO: 248182 - RNA, 53 nt, Homo sapiens
acgccccacgaccgccaggaacacagcacccacccacacccacacccgcgacg

SEQ ID NO: 248183 - RNA, 65 nt, Homo sapiens
aacagagacggcagaaggagggggagaacggagcaagacggaaacacagggcaagagcaaaaacc

SEQ ID NO: 248184 - RNA, 34 nt, Homo sapiens
ggagacacgaaacgaacgaacgaggaaccccaga

SEQ ID NO: 248185 - RNA, 68 nt, Homo sapiens
ccaaagcccacagagcaggcgcgccaacacaagagaaacaccaaacaagcaaagcgggggagcccccc

SEQ ID NO: 248186 - RNA, 76 nt, Homo sapiens
gcggacagagagcggacgggccaacccaaaaccagggcggcaaaacgagcgggccagaaggggggcagaaagaaga

SEQ ID NO: 248187 - RNA, 75 nt, Homo sapiens
cagcaagccaacaggcaaaggaccccaagaagcaggcagacacaggcccaccaggacgagagagcgacgagggca

SEQ ID NO: 248188 - RNA, 61 nt, Homo sapiens
ggcccagagcaccagcaagagaaagaaggaggaacgaagccggggaggccaggccgagacg

SEQ ID NO: 248189 - RNA, 53 nt, Homo sapiens
aaaggaaaacgcggaaaaccgacacaacagggcggagaacggaaaagcaccag

SEQ ID NO: 248190 - RNA, 81 nt, Homo sapiens
acacagcgagaccaaggagcccggaaacagccaaggaggaaccgacggcacgaaaaaaggaccaaccaggcacaggagaga

SEQ ID NO: 248191 - RNA, 85 nt, Homo sapiens
gaggcggagggcagggccaggaggaacagaggaggaaacgggaagcgaagggaaagaacgaagaaacggaaaaagagaaacaaag

SEQ ID NO: 248192 - RNA, 81 nt, Homo sapiens
cgcccgccgcgcggagcgcccccgcgccccgcaccagagcggggcaccgagccggacccaacccggagccggggacggcac

SEQ ID NO: 248193 - RNA, 74 nt, Homo sapiens
aagaccaagcgcgccacgcgcggcgcgccggagaacgaagagaaaggacacccacccagaaccaggcaacgcca

SEQ ID NO: 248194 - RNA, 78 nt, Homo sapiens
gccacccacaaacagagagaaggaaccacccacgcaggcaggaaaggcaccaggccagccggaaacacagaacacaag

SEQ ID NO: 248195 - RNA, 68 nt, Homo sapiens
cgcccgggcgcagcgagaggaggcaccgcggcacgccccccgggccgggcggaagagagaaggccacg

SEQ ID NO: 248196 - RNA, 86 nt, Homo sapiens
gcaccgacagcgccgccaccgagccgggcccaccccccaccaaggaagcccagccaacaggcaaggccccggggcaccagccgagg

SEQ ID NO: 248197 - RNA, 71 nt, Homo sapiens
aaggcggaccgcccccgccaacgaagaccgagaccaggaacgaagcagagcccaacaggggagccgagaag

SEQ ID NO: 248198 - RNA, 36 nt, Homo sapiens
gaaaaggagagcaccacgaggcaccaggagggacac

SEQ ID NO: 248199 - RNA, 73 nt, Homo sapiens
accggcacaaagaccaaggagaaacgacaacagcgcccaacacagagaaggaggagccagaacacacccaaaa

SEQ ID NO: 248200 - RNA, 52 nt, Homo sapiens
cccccgggccacgaagagcacagagccacgggaaaagggcccgcggccggcc

SEQ ID NO: 248201 - RNA, 82 nt, Homo sapiens
ccggcggagcggacgccagcgccggccccccggcggagaagaagcgcggccgcaccggccaaggaccagaacagagaagaaa

SEQ ID NO: 248202 - RNA, 80 nt, Homo sapiens
acagcgcagaggggcaggagccgggagccaccgcgaagggacgaacagcggggacgccccagcagaccgcccaggagagg

SEQ ID NO: 248203 - RNA, 74 nt, Homo sapiens
cgcggagcggggaagggacaccgaacaagacagcgccgcccggcggggcgcaagggggcggaggcagggggacc

SEQ ID NO: 248204 - RNA, 75 nt, Homo sapiens
cagggcaagccaaagacaacaaccccccccgcgaaacgcgaggaagagggcaagaagccagagcaaaaaaaccag

SEQ ID NO: 248205 - RNA, 70 nt, Homo sapiens
aaagaagcacgaacccagaacaacgccaagacacagaaagaacgaacaaaggaacaggagacagcggaga

SEQ ID NO: 248206 - RNA, 76 nt, Homo sapiens
cggggaaaagggccccagcgcccgcaccgacagggcgagcaggcgccgagcagggacaaagccaccgcccaaccag

SEQ ID NO: 248207 - RNA, 76 nt, Homo sapiens
ccgaacggggcaaaaaggcgcccccacagaagagccaccgacggaacgacagggcgggcggccaaaaaccccaggc

SEQ ID NO: 248208 - RNA, 77 nt, Homo sapiens
caaggaaggaacagcagcaaaaagaacacaaaggacagacagagagagacacgccaccagccgagcccccccgggac

SEQ ID NO: 248209 - RNA, 87 nt, Homo sapiens
agcaaaaccaaggcagagcccagcccagaagcagggaagccccgcggagccgccaccacgacgaacacgaaaaggacggagggaaaa

SEQ ID NO: 248210 - RNA, 91 nt, Homo sapiens
ggccagcggccgcgcacccccggccggaggcaccagcggggccgacgacgagccccgcgaggagcgcagcggagaggccagaacgcccgcc

SEQ ID NO: 248211 - RNA, 70 nt, Homo sapiens
ggccgaagcaacaagggacagcggcccaaagcaagacccgacacagaccccgcacccacgaacaaccaag

SEQ ID NO: 248212 - RNA, 66 nt, Homo sapiens
cccagccccaggcacagaccccagcgagaaagagcggcgccaccccgggagaaggcgaccgagacg

SEQ ID NO: 248213 - RNA, 55 nt, Homo sapiens
acaggccaaggggcccacccaaaagaagccacacacagaagacccaaagagaaca

SEQ ID NO: 248214 - RNA, 70 nt, Homo sapiens
cgggcagaagcgaagcgggacagaacagccaccaaaacagaaggaaaagacgagggaagaagaccgacaa

SEQ ID NO: 248215 - RNA, 73 nt, Homo sapiens
ggcagcgcggaggacaaagcagggacccgcgcccgggggcaccaagaacagaggacccaagaagaccagccga

SEQ ID NO: 248216 - RNA, 82 nt, Homo sapiens
gaccccgagcaccgggccccgcgaccggggcccggggaaggcccgccgcccgccccagcacgagagaaacagaggacgaccg

SEQ ID NO: 248217 - RNA, 53 nt, Homo sapiens
agcagacccgaccgccgcccacgagccggacacaagagggcaagaaaggcgcg

SEQ ID NO: 248218 - RNA, 55 nt, Homo sapiens
caaggcccgccagcaccccccggcagcagggccgcggagggcgcacgggcccaga

SEQ ID NO: 248219 - RNA, 85 nt, Homo sapiens
agcggaggggacgccacgcaacgccgacaccacgacagcgaggcagccagcagcagccaccagagcccaagagcacagccaaagg

SEQ ID NO: 248220 - RNA, 72 nt, Homo sapiens
caccaagccaggaggccaccaacccccgcggccggcacccccgaagccacacccaccgcccgggcaggccac

SEQ ID NO: 248221 - RNA, 33 nt, Homo sapiens
cacagaacggccacggggggacggaagcggcag

SEQ ID NO: 248222 - RNA, 67 nt, Homo sapiens
gccggagaaggacagcagagaaaagcggacaccaaaacccgacggcagacagccagaagacagcaca

SEQ ID NO: 248223 - RNA, 83 nt, Homo sapiens
ccgaagcgaaggaaacaacgaagcaaggaagccaagaacaagagacaagcgcaagcagccagagcccgggcgcaaagaaccag

SEQ ID NO: 248224 - RNA, 78 nt, Homo sapiens
cacccgcaccacccgaagccccacgcgggacgccacacgaaggccaccacaaaagcagagacgaggacgcgcacagga

SEQ ID NO: 248225 - RNA, 80 nt, Homo sapiens
gaagccagagcgaggacgccggcagaacaccccaccagaccacccagcaagcccacaaaaaaggcacaagcagggacagc

SEQ ID NO: 248226 - RNA, 48 nt, Homo sapiens
acaggcaaggagggggcggaggaggacccaagaagaccagccgaagcc

SEQ ID NO: 248227 - RNA, 79 nt, Homo sapiens
ccgccgaggccgcggcgccaaaccgaggggcgggaagaagcccgccgccaccaccccaccaccagcgcagcagagaaga

SEQ ID NO: 248228 - RNA, 58 nt, Homo sapiens
cagaaacggaacaccaagcgccacccgacagagaaaaacaaaagggacagcgcacgga

SEQ ID NO: 248229 - RNA, 79 nt, Homo sapiens
cacccaccaacaacaccacaaaaccacagccaaggaagaacgaagcgcgcagaaaacacagaaggcaaaagcgcaaaaa

SEQ ID NO: 248230 - RNA, 50 nt, Homo sapiens
gacaaaagggccaaagaagggagaacccccgccccaacaagaggccaacg

SEQ ID NO: 248231 - RNA, 77 nt, Homo sapiens
cgccacgcgcggaaggcagcgcccagcagcgcagaggaaaggcaagggcagaaaagaggggaaaaggccagccgcac

SEQ ID NO: 248232 - RNA, 70 nt, Homo sapiens
gaggcggagcggacaaaggagagcgcaaccaacccacgaccgcaacgcaagcagaaaggaggaaaacgac

SEQ ID NO: 248233 - RNA, 69 nt, Homo sapiens
gacgccagccaggcagcgcggaagccagcagggaggagcccaggcaaagacagcagccaggcccaccac

SEQ ID NO: 248234 - RNA, 92 nt, Homo sapiens
cggcgcgagaggggcgcggccggagcgggcggcgagacaaaggcgacggccggcgccagcgccagcgaggaaccgaacccagccaaaaggcc

SEQ ID NO: 248235 - RNA, 81 nt, Homo sapiens
ggggcgagccgcccgcccgccgagcagccagagaccaacacgccccgcagaaggccaacaaccagcagccggcaggcacgg

SEQ ID NO: 248236 - RNA, 70 nt, Homo sapiens
cagcgacgcaccgagaaaggaaggaaaaccgacgaacacgcagcggccgaggcaggggaagagagcggcc

SEQ ID NO: 248237 - RNA, 78 nt, Homo sapiens
cggaggggcacgagcgccacaaccccagcgggaggcgggcggcggggcggcacggcggccgccacacaggggagccgc

SEQ ID NO: 248238 - RNA, 79 nt, Homo sapiens
accgccagcccaagaaaaagcagcaacacgccgcaccccgcggcgaagaaaaaaccaggggacaagaggacaccgacgg

SEQ ID NO: 248239 - RNA, 74 nt, Homo sapiens
aaaggaccgagaaacaaacccaggaaaaagccaagagagaccggagaacgcgacaggcggagaccgacgcggaa

SEQ ID NO: 248240 - RNA, 75 nt, Homo sapiens
ccgccaggcaaagcaacaccacagacagagagacggccacagcacaacagggggccaaagggcgagggcacaaaa

SEQ ID NO: 248241 - RNA, 78 nt, Homo sapiens
accgagggaagaccacaaccacgaccacaaaccggcggagccacaggaggagagggaagggagcggccgggcaggaaa

SEQ ID NO: 248242 - RNA, 87 nt, Homo sapiens
ggaggcacgggcggcccgcaggaccggaccgggggagcgcccgggggcggagaaggccaggcagcagcgcaggaggagcccggcagg

SEQ ID NO: 248243 - RNA, 56 nt, Homo sapiens
gggagacacgccgccacgagcgccacaggacgaaaggccccaaagacaggacaggg

SEQ ID NO: 248244 - RNA, 76 nt, Homo sapiens
gcgaaagccaggaggagcgcagcgaagcacccacgagagagagagagagaggaagcgaagaaaaagcgccaggaag

SEQ ID NO: 248245 - RNA, 58 nt, Homo sapiens
ggacaccggaagccgggaaagaaacacaggggaaacacgagagagcaacagccgacag

SEQ ID NO: 248246 - RNA, 75 nt, Homo sapiens
caagaaccccgcacggacagcgacccgccccacccgcagcagaacaagaggccggaagagcgggagcgggagcca

SEQ ID NO: 248247 - RNA, 115 nt, Homo sapiens
gaccaggccggaccgggcaagaagcggcagaggaaagaggcccaggccagccacccaaagaagaccgccagagcggaacgaccccagagcgagcccgcagcagcccagaaacaaa

SEQ ID NO: 248248 - RNA, 87 nt, Homo sapiens
gcccagcaggaagcagaccccgaaaaccaagccgaggacgcggggccgggccacgcagaagcccgggccagcgcagcagcaagaggg

SEQ ID NO: 248249 - RNA, 76 nt, Homo sapiens
cgggcccccagcacgccaccaaccgaccagaccaacaaccagcgaccacgccacaaccagggaaagaaccaccagc

SEQ ID NO: 248250 - RNA, 82 nt, Homo sapiens
cacggcgccgaccagcaccaggggaagcgggacaacgggggcccagaaggggaagacccccagcgaacagagacccaaaaag

SEQ ID NO: 248251 - RNA, 73 nt, Homo sapiens
gggcgacaaaggacacacggaacacgcagaggaaagcagcagcagagcaacacccaccaggggacacacgaac

SEQ ID NO: 248252 - RNA, 87 nt, Homo sapiens
ccgagggaaacccggagaccaaaccgggcccgaccaacagcagggcagaagagagaaaacgcggcacagagaagagcaggcaagaac

SEQ ID NO: 248253 - RNA, 44 nt, Homo sapiens
gccgcggccgcgagccccaggagccgagcccgcgacggccacga

SEQ ID NO: 248254 - RNA, 77 nt, Homo sapiens
gcgcccacgggggagcgagccggagacagggcggagaacggaaaagcaccaggaagcagagaggaccgcagaaggga

SEQ ID NO: 248255 - RNA, 72 nt, Homo sapiens
acccggccaggacagaagggcgagaaaagagcgcaacaaaggagcacgacggcaggaaggaggagacgaaga

SEQ ID NO: 248256 - RNA, 72 nt, Homo sapiens
gaacacaggaaccgccccgagaggaaacacccccagaagaggcggccaaggaacaagacacagaaggaagaa

SEQ ID NO: 248257 - RNA, 67 nt, Homo sapiens
agacaccaaaaagcaaacggaccagaccgaccaccaaaagccaggaggaccagaaaacagcagaaag

SEQ ID NO: 248258 - RNA, 51 nt, Homo sapiens
gcgcggagaagcgcggagagccaggacaaaaccaggcagaaccaacacgaa

SEQ ID NO: 248259 - RNA, 72 nt, Homo sapiens
gccggaagcagcaccccacacgcccgggggcagggcacgcgcccggaggacagcgaacggaggagcgacggc

SEQ ID NO: 248260 - RNA, 53 nt, Homo sapiens
cccaacggggaaggggcagcgccccccgaaacaagacgcaggccagcagaacg

SEQ ID NO: 248261 - RNA, 86 nt, Homo sapiens
caagccacaggaggaggcagcaggcaaaagcagaccggaaaacccaccggcaagaccacacccgaggggagcccaggacaccacga

SEQ ID NO: 248262 - RNA, 84 nt, Homo sapiens
gcgcgagcggagcaccgcgaggaaaaccccagagaaagcaccaagaaacagggcgaggggaaggaccccccacggaagcaaaga

SEQ ID NO: 248263 - RNA, 84 nt, Homo sapiens
agaaccaacggacgacggcgaggacagcacccgccaaccccggaagggaagggccccacaccaaaccgccacgcaacagacgca

SEQ ID NO: 248264 - RNA, 78 nt, Homo sapiens
ccagggacccccagcgcgggcaccagacaccgaaaggcgccgcccgcgccggccaggcccggagcccccgccgcaggg

SEQ ID NO: 248265 - RNA, 61 nt, Homo sapiens
acagccagcccggggcgcacgagcagacgacgcagccagagcagcaagaggccaaggggac

SEQ ID NO: 248266 - RNA, 84 nt, Homo sapiens
ccgccccgccgacgcgccgcaccgccgcggcccggcccggccccgaggccggcaacggagacccaaggacccgggaacacaggc

SEQ ID NO: 248267 - RNA, 64 nt, Homo sapiens
acaccccaaaaagaagcagggacggccaagcacaacagaaggcaaccaagcaacaccaggcagg

SEQ ID NO: 248268 - RNA, 77 nt, Homo sapiens
ccggggagaccccgaggaacagcgaacgaacccggccacacccagacaacgaagagaggaaagaagcggaaaggagg

SEQ ID NO: 248269 - RNA, 57 nt, Homo sapiens
agacaccagacaccacacacaagacgcaaagaacacggacccagcaaaaagaagcag

SEQ ID NO: 248270 - RNA, 39 nt, Homo sapiens
ggacggaacagcccaaccagcaggcccggccaggcccca

SEQ ID NO: 248271 - RNA, 72 nt, Homo sapiens
agaagcccaagccaggacggaccccaagcaagccggaccgggagcgcacccccgccggggacgacagcgcac

SEQ ID NO: 248272 - RNA, 73 nt, Homo sapiens
ccccggccccccgcgggcccccgggaccacccggggaaggaagaagaagggccgagaaaaaggcccccaccgc

SEQ ID NO: 248273 - RNA, 73 nt, Homo sapiens
gacaacgagggcacgcaaccgcaacacgaccagaccagccccaccgcccccacagggcagcaggagcgacgcc

SEQ ID NO: 248274 - RNA, 70 nt, Homo sapiens
ggacagcgcaagcaggcaaggaagcgaccgcgagaaggccagcagaaacacccgccaccacacgaccaaa

SEQ ID NO: 248275 - RNA, 55 nt, Homo sapiens
ggcgggccaagagagccgaccagaacaaaaaccagaaaaaaggaacaacaagaaa

SEQ ID NO: 248276 - RNA, 78 nt, Homo sapiens
acagcaaccacacagacaccaaacggacaacaaaaagaggccgacaggaacccggcgaaggcgccgcggccccgcgcc

SEQ ID NO: 248277 - RNA, 66 nt, Homo sapiens
cgaggccccgagccagccccgacagcgggaaccacccccggagcagagggggagagggcaaggagg

SEQ ID NO: 248278 - RNA, 79 nt, Homo sapiens
gacacggggaagcgcaaaaacaagacggggcgccccacagaggggcgacggcaaggacggggacacaagaccagccagc

SEQ ID NO: 248279 - RNA, 64 nt, Homo sapiens
cagagccagcccaacccgaaaaacccgcaaaggcgagagggaccaggccagacggagcaccgga

SEQ ID NO: 248280 - RNA, 76 nt, Homo sapiens
gcccgcggccagcacggcaacgcagcccgaggacaagcggcggcgaagagagaacacgcacggaaggaaggagacc

SEQ ID NO: 248281 - RNA, 88 nt, Homo sapiens
gggcgcagaggccacacccacagagaacccagacaacaggacgccgccaaggacaaccaccaccagcgagcaaaagaacaaagaccaa

SEQ ID NO: 248282 - RNA, 73 nt, Homo sapiens
acaggagaaaaggaacccccgcgagaagaaggcgaacacagaagaaccacgcacaaggacagggaaaaaagcg

SEQ ID NO: 248283 - RNA, 58 nt, Homo sapiens
ccgggaacaggcccggagcggccgccggcccaaaggacccacgaggaagcggccgcgg

SEQ ID NO: 248284 - RNA, 73 nt, Homo sapiens
gcaggaaggccaccgacaggaagaaagacaccagaagacaccaaggacagagaaaagcaagagaagaccaaaa

SEQ ID NO: 248285 - RNA, 83 nt, Homo sapiens
acaggaggcaggccgccggccgaaggcccgagcgcccgaggcgcgggaggggggaccggggcagccccgggcaaccagcaagc

SEQ ID NO: 248286 - RNA, 54 nt, Homo sapiens
acaacaccggcaggaaccaccaggacagagagaaaacgaccgcaaaaagacgag

SEQ ID NO: 248287 - RNA, 70 nt, Homo sapiens
gaaggaccaagaaccaggagcgacaaggcccagcagcaacaagcccgggaccgggaaggcgggcgaccgg

SEQ ID NO: 248288 - RNA, 64 nt, Homo sapiens
agccgaagggaaccagacaaggcggagaacgcgcgaggagcgaaggaaaagaaaaccaccgggc

SEQ ID NO: 248289 - RNA, 52 nt, Homo sapiens
gcaagaggagaaacaaggaaaggccacaacagcaaggaccgccagaagcagc

SEQ ID NO: 248290 - RNA, 60 nt, Homo sapiens
cgcaggcagacaaaagggccaaagaagggagagagagagcacgcaaacaaggagcagaac

SEQ ID NO: 248291 - RNA, 73 nt, Homo sapiens
cccccagacgcccccacggcagaaggggaagccagcaacgcggaagacgaagacacgaggcaacaccaacaga

SEQ ID NO: 248292 - RNA, 52 nt, Homo sapiens
ggaaaaccagagaaacaagaggaggagggagggcccccaaggaagacagcac

SEQ ID NO: 248293 - RNA, 89 nt, Homo sapiens
caagggcgacgccgcggagaggagcgcgcggcgcgcaggagcggagaccggacgcccggacaagcagcacaggacccaggagcaggagg

SEQ ID NO: 248294 - RNA, 69 nt, Homo sapiens
cggccagcccaggggaacggaaaggaaacagacagcgcgaggagagaagccacaagcaacgaaagcaga

SEQ ID NO: 248295 - RNA, 60 nt, Homo sapiens
cgcggaggagcgcccggccgacggacccaccaaacaccaacccacgaaagcccaacccca

SEQ ID NO: 248296 - RNA, 96 nt, Homo sapiens
cgacaagccgcggcagccgcggaccaccgccgccaggaaaccaagggagggaaccgggaacggcgcggcaaaggagagagaaagggccagaaggcc

SEQ ID NO: 248297 - RNA, 122 nt, Homo sapiens
agaggacacccaggaacaagggaaagagcccggaggggagggagagaaaagaagaggaccagcacggcccggacgcacaccccaggagaagaacccagaaaagacagcaaaaaaccagcccc

SEQ ID NO: 248298 - RNA, 73 nt, Homo sapiens
gccccgcaggggccgaccgcaacacggcgcggaaaacgcgaacggcgccgaaaagcgaaaagaaacaagccgc

SEQ ID NO: 248299 - RNA, 69 nt, Homo sapiens
cgcgcagacgccgggacgaggaaaaaccaggcagggaggagaaagagccaagaaaaagaaaggaaagcg

SEQ ID NO: 248300 - RNA, 74 nt, Homo sapiens
acacgccgccgagcagccgccagccccacggacggacgccagccccacaacagccccacacaggacgagaagga

SEQ ID NO: 248301 - RNA, 77 nt, Homo sapiens
gcagaggggcggagcggcgacagaccccaaaacacgagacgcgcagaacgcgggcaagccaacgaaaaagggaaaac

SEQ ID NO: 248302 - RNA, 69 nt, Homo sapiens
cagaggacgacaggccgggagaagaaacacggccaggagagaaagccaaaggaagaaaggagagccaac

SEQ ID NO: 248303 - RNA, 79 nt, Homo sapiens
gcaaagcccagcgcgcaacccaccgcgacccgccacccacagcagcccgcgaggaaaaccaacggcccggaggaccaca

SEQ ID NO: 248304 - RNA, 71 nt, Homo sapiens
gaaagcggcccacaaaaacagcggaggagaccgggaaaccgccgaagacgaaggaccgggcaaagagccag

SEQ ID NO: 248305 - RNA, 72 nt, Homo sapiens
ggacaagaccaccggacgcgcagcagcgaacagagaaacagaagcaggcgcagaccgagaccaccgcgggca

SEQ ID NO: 248306 - RNA, 78 nt, Homo sapiens
agacgcgagcgacaagagaaggaggaaagggaagaaaacgccagagaagcagagcagcccggagcgaggggagaccgg

SEQ ID NO: 248307 - RNA, 75 nt, Homo sapiens
caaccagacaccagagccagaagaagcaggaaagcgaccaccacggcgggacccgagagaacgcaagacccaccc

SEQ ID NO: 248308 - RNA, 70 nt, Homo sapiens
ggaaccacccccaacaaccagggcaagagaagcaaaacacagaggaaaagggaaagaggaacccaagaag

SEQ ID NO: 248309 - RNA, 81 nt, Homo sapiens
ggagaagcagaacccagcgaaggacggacgagaggcgaaggagaaagaagagaacggaccccaagaggaccgggaaacaga

SEQ ID NO: 248310 - RNA, 71 nt, Homo sapiens
gaaggggcccagagacggggaaacgacggacacccacagggcaagcaggcgagaaggcacgagcgccacga

SEQ ID NO: 248311 - RNA, 69 nt, Homo sapiens
cccaagcgaaaaagcgggaacgcaggacccaaagcggaaagggaagggagccgaagggacaggcgcagg

SEQ ID NO: 248312 - RNA, 73 nt, Homo sapiens
aacaagaaagaggccagccaccaacgaaagcaggagaaaagggaaacagggcaagacagaggaagaaaaggaa

SEQ ID NO: 248313 - RNA, 82 nt, Homo sapiens
gaaaaccaaccagaagacgaacaaacagcaagaaagaccacaagaccaacccagcacccgccggggcacacgagagacgagg

SEQ ID NO: 248314 - RNA, 59 nt, Homo sapiens
cccagaggagaaaccggagcgggcacggacacaagaacgagagccaaaggccagccacg

SEQ ID NO: 248315 - RNA, 57 nt, Homo sapiens
cgccaggagaccgacgccaggcacgacacaggaagaaccaaccaggaaaggcccaaa

SEQ ID NO: 248316 - RNA, 85 nt, Homo sapiens
gacgccccaccgcgcacccccgcgccgcgagcagccggcggccggccgcgagacaacggcaagcggagaagagcaaggccgaacc

SEQ ID NO: 248317 - RNA, 67 nt, Homo sapiens
aagagcacagaggaagaaagggaagcaaaggcgaagcccggaaagagaaagacggggggaagagaag

SEQ ID NO: 248318 - RNA, 75 nt, Homo sapiens
gcaggagcaagcgcagcaccaccaacaagccacccaggaccccaggaccagaaggcaaccaacagaaccaccaga

SEQ ID NO: 248319 - RNA, 73 nt, Homo sapiens
ccgggagacaccgccaccgccagacaggaagggaaggggcggagacgggcggaacgcaggaggccagaggaca

SEQ ID NO: 248320 - RNA, 76 nt, Homo sapiens
gggcccggcggggacgagcaggaagcgcggcgagcgcgagggagcgcgagcggaccagcaggcaggccccccgacg

SEQ ID NO: 248321 - RNA, 79 nt, Homo sapiens
agcgcggagggcggcgcaggccggggcgagcggcgggcccgcgggccaggccgggagcaaaggaagaccagaggagaga

SEQ ID NO: 248322 - RNA, 69 nt, Homo sapiens
gaaggagcggcagcaggcgaagccacccgggagcccaaccgaggcaaaagaaacaaacacgcacaccaa

SEQ ID NO: 248323 - RNA, 81 nt, Homo sapiens
cgggacgcgcgcgggcacccacggagccccggggcggcgcgcccaagccccacgacacccaaccccaccagcccggccgac

SEQ ID NO: 248324 - RNA, 54 nt, Homo sapiens
ggaacccgccaggcagcggggacgcaggagaggaggggacacaaaggaagaggc

SEQ ID NO: 248325 - RNA, 85 nt, Homo sapiens
ccggggccgccgcccacccgcggcgcggggaaaggcgcgagacccagaggccgcggaacggcagagcgaaacaaacaagagggcg

SEQ ID NO: 248326 - RNA, 72 nt, Homo sapiens
ggggcgggagggcggaggaggagaacacagaaccaccaggagagcaaggaacaggacacaaagaggcgggac

SEQ ID NO: 248327 - RNA, 60 nt, Homo sapiens
cgcggccccgccgccccagcccgccccccgggccgcaaaccagccggcgggcgccacaac

SEQ ID NO: 248328 - RNA, 77 nt, Homo sapiens
acggaaggacggaagacggcccagcgggagaaccagcccagccggacacgggcccaacagcgagcccaccagggcca

SEQ ID NO: 248329 - RNA, 86 nt, Homo sapiens
cccgggacaacagcgcggggcacagggccagaaccacacggcagaggcgcaacagggcgcacgcaggccagggcccgcccccccac

SEQ ID NO: 248330 - RNA, 74 nt, Homo sapiens
ccgagacacagaagaccaggaaaacagaggcgagagcgagacaaaacagggcaaggcgcccagaagcggcgacg

SEQ ID NO: 248331 - RNA, 69 nt, Homo sapiens
gccggcgacaggggagagccgagccaagaggcaagaggagacaggccgagaccgagggccccgcacccc

SEQ ID NO: 248332 - RNA, 51 nt, Homo sapiens
agggccaaagaagggagagaggcgggcaacacaacaaggcgcggacaccca

SEQ ID NO: 248333 - RNA, 99 nt, Homo sapiens
ggggcagcgcccggaccggccgagaggaagacgagccgggaggaacggcccggaaacaggaggacgggcccccggagggccacaagccagagcgccccg

SEQ ID NO: 248334 - RNA, 85 nt, Homo sapiens
agaaccaggccgggccagacacgacaccaccaccccaccccggacgcggggaggaggaggaggaagggagcggcagcaggaagga

SEQ ID NO: 248335 - RNA, 79 nt, Homo sapiens
ggaagcccgcggcgcccgccggaccagacgcggcgggcgcagccacgacgggccgagccgccacgagaaccagccaaaa

SEQ ID NO: 248336 - RNA, 63 nt, Homo sapiens
gaaaaacagaacagcgcccgcgaaaggggaggacgcgagcggaagagaagcaaaaagacaagg

SEQ ID NO: 248337 - RNA, 76 nt, Homo sapiens
gccaggcgacaggggaacagacagaaggagcaggaaccaaaggacaacgaagagaggaaagaagcggaaaggaggg

SEQ ID NO: 248338 - RNA, 82 nt, Homo sapiens
ccgggggcgcggccgcgcgccgccggcgaaggaggaggcggccggagcccagccacagagcgagaaggaaaaaacagggaag

SEQ ID NO: 248339 - RNA, 34 nt, Homo sapiens
gggcacagacccaccaggcagaaaacacaggaac

SEQ ID NO: 248340 - RNA, 84 nt, Homo sapiens
cgcgggccggccccgcggggagcgcccccggcgcgagccccaggaaagaccgcgaccgcacaagcagccgccagcggaaccaag

SEQ ID NO: 248341 - RNA, 79 nt, Homo sapiens
aaaacacgaagcacgccaggacggaggacaggaagggaacgggaaagcgcaacaggacccaaacaggggaacagaggag

SEQ ID NO: 248342 - RNA, 91 nt, Homo sapiens
acgggaagcacgggaccgagaacggaggacaacaccaagcaagcacgccagcacgcaggcaggaggaagcgggcaaaggagacccagcaaa

SEQ ID NO: 248343 - RNA, 66 nt, Homo sapiens
ccccccggcgccgcgccggcggcgggaaacacaaagaagacaccagaagggccagcaccacgacaa

SEQ ID NO: 248344 - RNA, 48 nt, Homo sapiens
caaaagggccaaagaagggagagaggagacagggaagacaagcaaggc

SEQ ID NO: 248345 - RNA, 70 nt, Homo sapiens
gagaagaggaacagcgcaaaaaacgacaaccaaggggagggcacgcagcacaagccagccgccccggacc

SEQ ID NO: 248346 - RNA, 57 nt, Homo sapiens
ggaaagaggagaagaggaagaaggagcgagccccccacacgcgcgcgggaacccgca

SEQ ID NO: 248347 - RNA, 77 nt, Homo sapiens
ccgaccggaggacgcggagaaccggcacagcccccgggagccaaaaaccgaacacccggaaggggacaagggacggc

SEQ ID NO: 248348 - RNA, 69 nt, Homo sapiens
gcaaaaacaagacggggcgccccacagaggggcgacgggacggacaagggagggccaagaacccggagg

SEQ ID NO: 248349 - RNA, 74 nt, Homo sapiens
cccagccagccgaggggacccgcacaagaaaacccacgaagggaacacggcaagaacggaagcacgggcggagg

SEQ ID NO: 248350 - RNA, 78 nt, Homo sapiens
gggccaaggccagggagcaacacgcgcaaaacccacaacaccagcagcacagacagggccgaacaaacgcaagaaacc

SEQ ID NO: 248351 - RNA, 55 nt, Homo sapiens
gccagaagagggagagacagaagagggccaggagcaagagagacccacgcggcca

SEQ ID NO: 248352 - RNA, 69 nt, Homo sapiens
caggacaaaggaagccaagcaggaggcaagaaggaaccagcaaagcgccacgaagcacaagcaagagga

SEQ ID NO: 248353 - RNA, 74 nt, Homo sapiens
ggagggaacccgcccccagggagggaacaaagcccacagcaccgaggggacggaaaaaaaagacagagaggaaa

SEQ ID NO: 248354 - RNA, 79 nt, Homo sapiens
gagacgggacaagacagggcaaaggacagaccagggcacacgggccacagaggaccagcaaggagaagaaaggagcagc

SEQ ID NO: 248355 - RNA, 74 nt, Homo sapiens
ggaaaccgaggccccgggaggaaaagcagcagaacgcagcgcccagcaggagacagacgaccccgcgagaacac

SEQ ID NO: 248356 - RNA, 77 nt, Homo sapiens
gccaaacccaggacacacacgccaccgccacaccacacaggacccaccaggcaaggaccgggcaagcggaaagccgg

SEQ ID NO: 248357 - RNA, 78 nt, Homo sapiens
cgcgggaggccaagaccgcggggaggagccgcagcgccagcaccagcggcgcaaaccggcacggcgaccggaaaaggc

SEQ ID NO: 248358 - RNA, 76 nt, Homo sapiens
ggccggcgggcgcgggagaagacggacccaccacaggacgacaaaccgagacaccgcaaacagggacgaaggcaaa

SEQ ID NO: 248359 - RNA, 72 nt, Homo sapiens
ccacagcccgcgggcgccggaacccgggccccgccaagcaggggagcagcaagccgggaaacagcgcgccca

SEQ ID NO: 248360 - RNA, 39 nt, Homo sapiens
gcgaggcagccccaaacaccgggggacggcagaaagagg

SEQ ID NO: 248361 - RNA, 78 nt, Homo sapiens
ggccggacagaaaccagaccagccggcccagaacagccacccggggaaacgacaacagcgcaagcagaaaacccaaac

SEQ ID NO: 248362 - RNA, 75 nt, Homo sapiens
aaaggcacggcgacacaggcaagaacccggagcgaagaacagagccgcccaaagagacaccaaacccagggaccc

SEQ ID NO: 248363 - RNA, 37 nt, Homo sapiens
gaccccgaccccggcccggggggcacccccaggagaa

SEQ ID NO: 248364 - RNA, 72 nt, Homo sapiens
cagggaacgcaaaccaagaagaaggcggcacaagaaaaacagcaaaaagaaaaggaggagccaagcaaaccc

SEQ ID NO: 248365 - RNA, 67 nt, Homo sapiens
aaacgggccacaaaccggcccaacaaccacaaggagacgacgcaaccaaaggggggagggagcaaac

SEQ ID NO: 248366 - RNA, 54 nt, Homo sapiens
gcgaagaagaaacaagacgagagagagacacacccacagcacgagacgacggag

SEQ ID NO: 248367 - RNA, 79 nt, Homo sapiens
cacacgaaacgcaaccacacacgcccaagacacagagaggaagcccaaaaggaaagaaccagagacgacacccgccccc

SEQ ID NO: 248368 - RNA, 72 nt, Homo sapiens
aaacaagaaaaacaaagccaaggaaaccccaacacagagccaagcgccaaggggcgggacagaacccacggg

SEQ ID NO: 248369 - RNA, 82 nt, Homo sapiens
agaggcccgggagccgccggccaggacgcccccgaggggagaccgcgccccggagggcaacccacaggcaaaagagggagcg

SEQ ID NO: 248370 - RNA, 87 nt, Homo sapiens
gcaggacgcagagacagcccccagaacaggaagcgccagcagaaggagacacacagagcccaccacgccaccacacccgggaccagc

SEQ ID NO: 248371 - RNA, 75 nt, Homo sapiens
ggggggcggacgcgcgcggggcaggccgcagaggcaggggaggagggcaccagcccagaccggcccaaagaccaa

SEQ ID NO: 248372 - RNA, 74 nt, Homo sapiens
gcaagaaaaacgcaaaacaacagaggaccaacaagcagagaaggggacccaaacacaagacaacccacccgagg

SEQ ID NO: 248373 - RNA, 60 nt, Homo sapiens
cgcaagaggcagccaccacgggccggacaagcagaccggaagaccgacggaagaccacac

SEQ ID NO: 248374 - RNA, 40 nt, Homo sapiens
gcccgggcgcggaagaagccaagaaaaccgacaacccaag

SEQ ID NO: 248375 - RNA, 82 nt, Homo sapiens
aggcaccaaagggcaccaccaacaagcccaacaagcacgggagaccaggcgaagaacggcccaacaacaggccagcaccaac

SEQ ID NO: 248376 - RNA, 61 nt, Homo sapiens
cggaggcgggccagggccagcgcgggggacgaccaggacagaagacaggagccgacgcaga

SEQ ID NO: 248377 - RNA, 77 nt, Homo sapiens
ggacgaagcccaaaccacaagccacaaaagggcggagaacggaaaagcaccaggaagcagagaggaccgcagaaggg

SEQ ID NO: 248378 - RNA, 112 nt, Homo sapiens
cgacggggcgcagcgcaggggcgagcggcgggcaagcgcgggccgcggaggaggccaggggacagagcgaagaaccccccaagaagacgaaacccccgggccacaagaaggg

SEQ ID NO: 248379 - RNA, 34 nt, Homo sapiens
caacccggagagccggggacaggggacgaccagg

SEQ ID NO: 248380 - RNA, 61 nt, Homo sapiens
acacgagcacaagaccaaacggaaagcacaagaggaagagaacgcccaagaagagaagacc

SEQ ID NO: 248381 - RNA, 77 nt, Homo sapiens
caaaaaccaccaaaccagcaaggaacgcacgcccgaacaacagggagaaaccgacccacccaccagagaaccagagg

SEQ ID NO: 248382 - RNA, 68 nt, Homo sapiens
gagacccgccaggagcaaagggaggcaggcgacaacagaggagaaggcgaagaaaacagccaagcacc

SEQ ID NO: 248383 - RNA, 53 nt, Homo sapiens
aacagggagaaacaggaggcggaggagccaagagggcccgaggaaaaaggaac

SEQ ID NO: 248384 - RNA, 87 nt, Homo sapiens
ccggcggccgcggggcacagcgcgagcgagagcgagaagcggccccgggaggaggcagagcgcccgcggcagcacaagaaggaccac

SEQ ID NO: 248385 - RNA, 111 nt, Homo sapiens
aggacgagaagggaaggaaacagcaagcgaagccgaaaaagcgcccgagacgggcccgccgaaagagggggccaggaaccagaagacgaggaagagaaggagcccccaggc

SEQ ID NO: 248386 - RNA, 78 nt, Homo sapiens
aaacaaaagcaacaaagaggggggggacaggaggacaccccgaacccagccgggagcgcgcaggagagcgcaccacag

SEQ ID NO: 248387 - RNA, 74 nt, Homo sapiens
ggaaacgcggaggcggggacccgcaggccgggcagggcccaggggagccaccagcaacaggcagagcggaaaga

SEQ ID NO: 248388 - RNA, 70 nt, Homo sapiens
cccaaggcaacagggagggacacacccaagcacggaccaaagagaggaacagggcgcaccacagaagagc

SEQ ID NO: 248389 - RNA, 73 nt, Homo sapiens
accgaccaagaagacaaagagaacgccgaaacaagccggagaagggaaaaaccaaaacgcccacaaaccgcaa

SEQ ID NO: 248390 - RNA, 72 nt, Homo sapiens
ggcggaaggcagggaaaccgggcaacacaggagggcggacgggaacggagccccccgcacaggacaaccacc

SEQ ID NO: 248391 - RNA, 73 nt, Homo sapiens
ggaccgaaagagggccaaagaggaaaggagaaaagaggcgcggaccaggggaaggcaaaaggcccgggaaacc

SEQ ID NO: 248392 - RNA, 66 nt, Homo sapiens
gccccgggcggcacgaaaaccgagaacagggggggcaaaaccaagcacggacggaagagagaggca

SEQ ID NO: 248393 - RNA, 67 nt, Homo sapiens
ggcgggcaagggcccacacagggcacacagaggcacgagaacggggaacagaacagcccaggagcgg

SEQ ID NO: 248394 - RNA, 61 nt, Homo sapiens
ggagcccagggaagcagccgaccagccgcggagccgggggcaggagggagcggcaacaaca

SEQ ID NO: 248395 - RNA, 77 nt, Homo sapiens
gcggcggccgggagggaggcggcgccgcggccgcgcggacggacgccgccgccggcgagcaggcaacaggaagaaga

SEQ ID NO: 248396 - RNA, 61 nt, Homo sapiens
gccagggcccggcccgaaaggagagccgaagaaggagagacgaccacgcaacagaaaaaga

SEQ ID NO: 248397 - RNA, 41 nt, Homo sapiens
ccgccccaagaccaagaaggaaagaacaggccgggcagcgg

SEQ ID NO: 248398 - RNA, 68 nt, Homo sapiens
agcaacccaagcaagaccagcagagaggaaaaacacaacccaagaaacggggcccacaggccacccgc

SEQ ID NO: 248399 - RNA, 44 nt, Homo sapiens
ccgacgaaaaccagagaggaggagacgagcgaaccaagaagcag

SEQ ID NO: 248400 - RNA, 73 nt, Homo sapiens
cagaggcagggcaccgcccgcccccccacccagggaaaacgaacggcaagccggcccacccgagagccagcag

SEQ ID NO: 248401 - RNA, 72 nt, Homo sapiens
gaacaaaccgcacgacacaggaaaggacaaaaccagaagcaggggaggacaccgggcccagacagaagcacg

SEQ ID NO: 248402 - RNA, 76 nt, Homo sapiens
cacacgaaccagggacacagcaaggccagggggaccagggagaggacgcccaccaggaggcagaggcacagaagca

SEQ ID NO: 248403 - RNA, 76 nt, Homo sapiens
gcggaagcaacacaacaggaggcggaggcgaaagcggaacgaggacccaaagacaggaccacgcaccagcagagaa

SEQ ID NO: 248404 - RNA, 38 nt, Homo sapiens
gcgcacaaacagccagaagaagaaagccacacacgagg

SEQ ID NO: 248405 - RNA, 73 nt, Homo sapiens
gcacagaagcaaggacaaccagaaagcaggggaccacagcaagcacaaccaagcagaagagagaggagggcac

SEQ ID NO: 248406 - RNA, 75 nt, Homo sapiens
ccagcccagcgaccagcagaagacacacccacaggcacaaaaagaggaaagcaaaaggaaaacagccgacgagga

SEQ ID NO: 248407 - RNA, 50 nt, Homo sapiens
gggagggggaggagccgaacgagccccagccagggacccaccccgggaca

SEQ ID NO: 248408 - RNA, 83 nt, Homo sapiens
agagagcgggcgggcggccgggagacccacagcccagaggcaggcgaaccgcagaagcgcccagagaaggacgcccaagaggc

SEQ ID NO: 248409 - RNA, 67 nt, Homo sapiens
gccacgcaggggaggcgccgagaccgggaagccggaagcaggacgccgcccgaagcgggaacgcccg

SEQ ID NO: 248410 - RNA, 78 nt, Homo sapiens
agcagcccccagagcgggaccacaggcccggagcgccaccacaggcaagagaagcaccaggcgccaccaggaagacgg

SEQ ID NO: 248411 - RNA, 76 nt, Homo sapiens
cgaacgccccccagaaccggcacccaaaggaagaccaaagcaagggaggagaagccagccccgcggcgggcgggaa

SEQ ID NO: 248412 - RNA, 61 nt, Homo sapiens
aaagcaggcgcgggggggcgcgaggacccggacagccgggaagacagccgccaccaggcgc

SEQ ID NO: 248413 - RNA, 80 nt, Homo sapiens
aggagaagccagcccgagagccagcgggcccccgcccggagagccagcaccccaaggggggccccccagagccaagaggg

SEQ ID NO: 248414 - RNA, 59 nt, Homo sapiens
gcccaggagcacggacgccagaacggaacgcacaccagcaccagcccaccaaaccagca

SEQ ID NO: 248415 - RNA, 79 nt, Homo sapiens
cagagggggcccgcccgcaccccccgggcccgcccaagggccccccgggccggccgccggacgacacagcccgccgcca

SEQ ID NO: 248416 - RNA, 57 nt, Homo sapiens
gagccaccagcacggaccaggaggcgagcaacagaccaagacacccaggagaaagac

SEQ ID NO: 248417 - RNA, 72 nt, Homo sapiens
agacggaaaagcaacgagaaaaaccaagggcgcacccccgagagagccacggaagggcgccaaggagccacc

SEQ ID NO: 248418 - RNA, 35 nt, Homo sapiens
caggggaccaccggacaggcccccggcccaggcgg

SEQ ID NO: 248419 - RNA, 87 nt, Homo sapiens
cgcgaggaggcgcgggagggcgagaacgaccccgagacgagagaagaaagacgggacaagggcacacggcaccagacagccgcgaag

SEQ ID NO: 248420 - RNA, 97 nt, Homo sapiens
ggcacgccgcccggcccgggcgcccgggcgcccgcaggcggcaggaaccccccggcgaagaggcagaggacagacacaaaaagacgacgggagcggg

SEQ ID NO: 248421 - RNA, 40 nt, Homo sapiens
ggaagggaaggcccaggaacaccggaaacgccaggccaca

SEQ ID NO: 248422 - RNA, 80 nt, Homo sapiens
gaaacaccaggcgcggcggcccagccccgacacaggaaaggagggagaccaaccaggaccgcaaaccagcaagcaccagc

SEQ ID NO: 248423 - RNA, 83 nt, Homo sapiens
gcgggggcaccgagggcaccacgcgcgggacccaaagcagcagaagacacgaccaccagaagccgagaaagaaggaaggaagg

SEQ ID NO: 248424 - RNA, 45 nt, Homo sapiens
aggccgaaagagcacggacccggaagaacaccaccccacccagac

SEQ ID NO: 248425 - RNA, 81 nt, Homo sapiens
cggccggcaggcggccgagggaaagggaggcagcgagccgaaacgagcaagaagaaaaagacaagggcagagcagccgggg

SEQ ID NO: 248426 - RNA, 86 nt, Homo sapiens
cacaaaaggagaggacagcagccgagagacacaacgacgaccgggaggcgaggcaggagaacgcgaaccggagaggcggacggcag

SEQ ID NO: 248427 - RNA, 69 nt, Homo sapiens
cgggcgaaaaacggagccaaaccccacccacagcggagacccagcgagacgacgggaccgaaggacccc

SEQ ID NO: 248428 - RNA, 82 nt, Homo sapiens
aggacacgaccccgccccacgcccaggagcaggaacaggacacccaaccgcgagaccagcaaggacgggggaccaaccgcgc

SEQ ID NO: 248429 - RNA, 67 nt, Homo sapiens
aagagaagagggggcaagaaaggcgggaaaacggcacaaggcgacgagggagggcagaccgccaggc

SEQ ID NO: 248430 - RNA, 54 nt, Homo sapiens
cgggaagccaggaacagcggggcacagacccaccagaggaaccaaccagaggcg

SEQ ID NO: 248431 - RNA, 57 nt, Homo sapiens
agcgcagggcacggaaggggcccagcacaggggcaccagcgggcacaccaagaagcg

SEQ ID NO: 248432 - RNA, 57 nt, Homo sapiens
agacagacgcaggagcacaggcgagccaaggcaggacagcaaaggccaaccaaaccc

SEQ ID NO: 248433 - RNA, 70 nt, Homo sapiens
cagcaacaccccggggaaagcagaagaaacaagggaagacccgaacagcccagacccggaggccgaggaa

SEQ ID NO: 248434 - RNA, 80 nt, Homo sapiens
aaaggaagcgcgggccagcgacccgcgccagcgcccagggggggaaaccaccgacagcccaccgaggaagaccaaaggac

SEQ ID NO: 248435 - RNA, 58 nt, Homo sapiens
ccaagaaaagaaaaacaccaaaacgacaagaccaagcaaacaacacccaacagcccaa

SEQ ID NO: 248436 - RNA, 85 nt, Homo sapiens
aggcaagagaacagcagcgccgcccgccgacagccaggcccgggagaaggcgccaagccggcaagagaaagagaggccagaacag

SEQ ID NO: 248437 - RNA, 88 nt, Homo sapiens
ggagacggcaaaggcggaccgacaccacgacgacgggccacagcagccggcggcggcagaggggcaaggggaaggccaaggacgagaa

SEQ ID NO: 248438 - RNA, 110 nt, Homo sapiens
cagagggagccgcccccgcggggcgcccggagccggccagcgcaccaaccagggaagcagagagcaaccaagcaccaccaagcccacagcagcaggaacaagagaggcag

SEQ ID NO: 248439 - RNA, 68 nt, Homo sapiens
cccgcccgcccagaggcagaagccaggggagggccaaaagggacaccgagcacaagaaaacaaagcac

SEQ ID NO: 248440 - RNA, 83 nt, Homo sapiens
gaagccacaggcagccgcagggaaacagaagcacagagaggcggaggaagaccccggagggcgaggcagagggagccaagggc

SEQ ID NO: 248441 - RNA, 110 nt, Homo sapiens
aagcgacacaaacaaaccgaaagaagaagaggagaagaaaagaccagacgaccgggcgaggccaccccgaggcaaggccccagaggaggaccaagagcgggagcccgaag

SEQ ID NO: 248442 - RNA, 58 nt, Homo sapiens
gccaagaaggacgacgcagccacagcgaggagcgaggaaaaacaccggccacgaaaca

SEQ ID NO: 248443 - RNA, 38 nt, Homo sapiens
aaacgcggaaagaagcagaaggcaaacagcccccagcc

SEQ ID NO: 248444 - RNA, 72 nt, Homo sapiens
caccaccgagacccagaagcaacgagaggccccagcgacaacaccgaggacaaggaaagaagcccaccagaa

SEQ ID NO: 248445 - RNA, 57 nt, Homo sapiens
agaccggcagccccagcgacccaagaaccggagccgagcccggaagccggcaagaca

SEQ ID NO: 248446 - RNA, 81 nt, Homo sapiens
gcaccgcgggacgggaaccgcgacacaagcacgcggcagcgaaggggaaccacccccagaaccagccaccagcaggccgca

SEQ ID NO: 248447 - RNA, 73 nt, Homo sapiens
gcgcccccccgccgcccccccgcccgcccgccggccgcggccgggaaggcgcagccgaacggagaaacccgcg

SEQ ID NO: 248448 - RNA, 79 nt, Homo sapiens
aaagacaaaaggcgggacgaaaaccacgagccacccagaaagcggcaccaggggagagagaacccccagacacacagca

SEQ ID NO: 248449 - RNA, 72 nt, Homo sapiens
aaagaagaccaggaggacagcgacagcaagcaacccccaacacaccaggagagagcgaagcaccgcgcagac

SEQ ID NO: 248450 - RNA, 85 nt, Homo sapiens
gaagaagaagcaggagaacgaaacggagccagagaaggcagaaggggagaagccgcaccaggcgccgggcggcgacccccacgcg

SEQ ID NO: 248451 - RNA, 81 nt, Homo sapiens
ccgcaaggccgcccgggaacgcgacgcgagagaaggacccacggcgcgcgaagccgcacaaacacgcagaggcaagaagag

SEQ ID NO: 248452 - RNA, 75 nt, Homo sapiens
agagaggagggagaacacagaaacccgccccggggcaaggccagagaaggcgggagaaagacacgaaccacagaa

SEQ ID NO: 248453 - RNA, 34 nt, Homo sapiens
aaagagcccccagagagaaagcacgaaacacggg

SEQ ID NO: 248454 - RNA, 66 nt, Homo sapiens
gagaagagaagagagaacacccaacgagaaagcagccaagacggcgagaggaaagggagagcagga

SEQ ID NO: 248455 - RNA, 72 nt, Homo sapiens
aaaggccaaagcccagccccaggcacagaccccagcgaggccaaacgaccaagaaagcgggacgcggaaaac

SEQ ID NO: 248456 - RNA, 72 nt, Homo sapiens
accacagacagacgagccccagaagaggccaaccgccccccagcagcaggcacgggcgaaccccgagccccg

SEQ ID NO: 248457 - RNA, 76 nt, Homo sapiens
acccaccagagacacagagaaggaggaaacaggccccaggcccgacggccggccgagccggaaaaagaagaaaagc

SEQ ID NO: 248458 - RNA, 73 nt, Homo sapiens
ggacgacgggcgcagaaccccgagcggcgcgagaggaggagcaggaaaaaggcaccgggcgagccccgcggcc

SEQ ID NO: 248459 - RNA, 68 nt, Homo sapiens
agccccgagcgacggcgagacccagaagggccaagcgcacccccaccaccagcccacggaggcagcgg

SEQ ID NO: 248460 - RNA, 81 nt, Homo sapiens
accaggacggcagggcccccggagggaacccgcccccagggagggaacaaagcccacagcaccggaccaagacccacggcg

SEQ ID NO: 248461 - RNA, 68 nt, Homo sapiens
ccggacaagggcaccagaggacggagccacgaaacccagaaggcgcaaaaggccacgccggagggaac

SEQ ID NO: 248462 - RNA, 86 nt, Homo sapiens
ccggggagcagagcgagggcgagcccggaccgccgcaggcagagccagagcccaagcccccgcagggagcccaccgcgaccaggac

SEQ ID NO: 248463 - RNA, 79 nt, Homo sapiens
gaaacaccaaaaccagcggagcgacacagccaacacaggcacggccaagagagcgaggccaccaggacaccccgacaca

SEQ ID NO: 248464 - RNA, 76 nt, Homo sapiens
ggaaaagcgcaaccaaaaaaacaccaggacagaacaggaagcagcaccaacaagaacaggggagaaacagcagcaa

SEQ ID NO: 248465 - RNA, 79 nt, Homo sapiens
aaggcgggcagagcacgcgccggggaacgcaacgaggagacaggcgggggacaggccacccggccagaccaccagcgaa

SEQ ID NO: 248466 - RNA, 72 nt, Homo sapiens
aggcaacagcagccgcaaaaacaaggcggaaacaacgggcaaggaaaagcacggcgccgagaggaaggacac

SEQ ID NO: 248467 - RNA, 74 nt, Homo sapiens
aggagaaggcgaggccacagaaccagccacagcggggcggagaggaaggcacacacagaaggccaaacaagaaa

SEQ ID NO: 248468 - RNA, 76 nt, Homo sapiens
cacggacacccaggcaacgcccccggaaggacaacccccaggaaggaacgcggccacgaaaaacgaaaaaagccgc

SEQ ID NO: 248469 - RNA, 72 nt, Homo sapiens
cagccgacagcccgcccaggaagggacccgagcacgggcacccaggaggaacagcggagccagagcgaggag

SEQ ID NO: 248470 - RNA, 76 nt, Homo sapiens
gaacaagcaacggacacaggaggaccggaagaagaggggagaggagagccagcagcccccccaggacaagaggcac

SEQ ID NO: 248471 - RNA, 58 nt, Homo sapiens
ggccacaggccgggggagaccagcaagcaggaaacgcaggccaacaaaacgagcaaaa

SEQ ID NO: 248472 - RNA, 69 nt, Homo sapiens
gcaagaccccgccggagccccaaacagggacccccaccaaccaggaaaaggagcgccacaggacagcgc

SEQ ID NO: 248473 - RNA, 78 nt, Homo sapiens
aagaacaagacggacacagaaacccaaggcaggaaaggaaagagacaaagaaaggccgacagagcaaacggagggaga

SEQ ID NO: 248474 - RNA, 80 nt, Homo sapiens
ggggggcacgcagcgaagccacagaccccagaaacgggcaagcgcgcaaacccagaaccgacaaccccggaacgcgggca

SEQ ID NO: 248475 - RNA, 56 nt, Homo sapiens
ggggaccagagagcaaacaccggagccagaaggagcagcgcagggaagcagcaacc

SEQ ID NO: 248476 - RNA, 94 nt, Homo sapiens
gagaggaagccaggcacggccggccacccgaggcagccccagaaggccaggaccgggaccggaccgccacagcagccgggcccgccgggagcac

SEQ ID NO: 248477 - RNA, 79 nt, Homo sapiens
aaagggaggaaaaacaagggcgggggaggacaagccggaggaagcagacgaggcggaccagggacgagcgcccccggag

SEQ ID NO: 248478 - RNA, 57 nt, Homo sapiens
accccccccaagaaaggaaaaacccaaggacaacgacgggccccaacgagcacgaag

SEQ ID NO: 248479 - RNA, 81 nt, Homo sapiens
gggaaggccgaccgacgccgcggcgggcaaagaaaagaagacggagcggggcgcgggaagaaagaccccagcagggagaag

SEQ ID NO: 248480 - RNA, 82 nt, Homo sapiens
cgagcgaggggaggcaggcgcggcagacggcgacagggcggcggcgccaggcagggcgcagccacagaaagcccgccccaga

SEQ ID NO: 248481 - RNA, 86 nt, Homo sapiens
gaccagggcgacaaagggacccgggaaagcaggcaggagggagagcgccgaagaaccaccccccgccccgggcgggggaagcgaag

SEQ ID NO: 248482 - RNA, 75 nt, Homo sapiens
gcgaagaagacaccagagcaaagagagaaccacccgcacacagccacgagcaaagcggaacgggcacaaagaagg

SEQ ID NO: 248483 - RNA, 56 nt, Homo sapiens
gcgccaggacagcccgcaggaaaaaacggaacgggaagggacagcagcggggagcg

SEQ ID NO: 248484 - RNA, 77 nt, Homo sapiens
acagcagcagaccaagcggagaacagcggaggagcagacaaagaggcgggaggccgaaggcaccaaccaaaaccggc

SEQ ID NO: 248485 - RNA, 75 nt, Homo sapiens
agagcggaccgagagcgcgaaacgcacgagaaggaggaaaaggcccaggcgagaaagaaaccggaagaaagagac

SEQ ID NO: 248486 - RNA, 79 nt, Homo sapiens
ccgcggagacagacaagacaagaccggcggggaagcgcagggacgagaaaggcccgcagaggagaggagagaggaggcg

SEQ ID NO: 248487 - RNA, 74 nt, Homo sapiens
ggggaaagagggagagagaaggccagcccgccagaggcccacccacagagcgcggaggagaaggaccggagaag

SEQ ID NO: 248488 - RNA, 75 nt, Homo sapiens
ggaaggacgggcaacgagaaaaagccaagaacagcaccagggaagccagacgggacccgaaccaggaacccggag

SEQ ID NO: 248489 - RNA, 82 nt, Homo sapiens
gcggggccgagcccggccgccacgagaccccggcgcggacgccaggcggccaccccccaggcagcagcgccccgagccccgg

SEQ ID NO: 248490 - RNA, 58 nt, Homo sapiens
ggagaggagccagagccccacgggaaggagagcagccagcagacagagcgaaaagcca

SEQ ID NO: 248491 - RNA, 78 nt, Homo sapiens
gcccagccgccgccgccgccgcgccgcagcgccaccgaaagagccgccgggcgcaccggcgcgggcgaacccccaaca

SEQ ID NO: 248492 - RNA, 76 nt, Homo sapiens
cgagacggcagacccagcgccggcccaccgggacaccgacccaagcccagcagaagccaacagacggggccgcaac

SEQ ID NO: 248493 - RNA, 79 nt, Homo sapiens
cggaaacacagggaagaaaggaacgggagccagcgacagcgagaggacaacagcgccgaccccccgcccagccggagcc

SEQ ID NO: 248494 - RNA, 73 nt, Homo sapiens
ccagaagagaaggcagcccaccccagagcgcaaggagaaaggaggagcaaaaaacagaagcagggccagaagg

SEQ ID NO: 248495 - RNA, 77 nt, Homo sapiens
aaggaaccggggcgggccgggcagggcggcgaccacgacccacggagaaggcagaggagagaaaaccgacgcgggga

SEQ ID NO: 248496 - RNA, 73 nt, Homo sapiens
aaccacggcccacacggacggcaccacccgcaacaagccgccagcaccaagaaaaacaaccaccagcgagcaa

SEQ ID NO: 248497 - RNA, 72 nt, Homo sapiens
gaaggggcggcgcgcgccgggcgccggaggaacgacgaagcgggacgggggcggccccgggaacgccggcag

SEQ ID NO: 248498 - RNA, 95 nt, Homo sapiens
ccggaagacaaagaagaaagcccacagagacacaaccggagcccagagccacgcaaaggcacgaagaacacaaagcaaaaaggaaaagaagagaa

SEQ ID NO: 248499 - RNA, 56 nt, Homo sapiens
ggaccaggaggaggcaggaccaaaagggaaaagcaccgaccgccgaccaggcacgc

SEQ ID NO: 248500 - RNA, 71 nt, Homo sapiens
aaacgggggaagcagagcgcacaaagggaaagggccgaaaagaacaggaacagacgacagggaacagccca

SEQ ID NO: 248501 - RNA, 74 nt, Homo sapiens
ggacggagcgcaccgagcgccccgaaccacgcccgggccaacagaacacagggacagaggcacaaaaggagaaa

SEQ ID NO: 248502 - RNA, 73 nt, Homo sapiens
ggggacaggaggccccgcaggaccgcacccgcggagacggacgcccggaaacaggaacacgaaagaggaaaaa

SEQ ID NO: 248503 - RNA, 54 nt, Homo sapiens
ccaaaacggcaaaccaccccccaccccaagggcacgcgaaaaaagcccaggacc

SEQ ID NO: 248504 - RNA, 52 nt, Homo sapiens
gaagggccgccggcggcgggagacaggagagccgaccacaggaccaggaaaa

SEQ ID NO: 248505 - RNA, 56 nt, Homo sapiens
cgggggaagaaggacaagaggccagggcaggcgccaggaaggcggggaagagaaag

SEQ ID NO: 248506 - RNA, 87 nt, Homo sapiens
gagcggccggagggcgcgggaaggagccggaggcggcgaggagcgccgccgaggagagcagagagagcccagagaaccacacgcggc

SEQ ID NO: 248507 - RNA, 57 nt, Homo sapiens
gacaggcaggaaacccaaacccaggaggacaaacaggcagccagaacccccccagac

SEQ ID NO: 248508 - RNA, 40 nt, Homo sapiens
ggggcagagcacaaagcgaagaaagccgccgcgcccaggc

SEQ ID NO: 248509 - RNA, 78 nt, Homo sapiens
ccccagccgcgcgaccgcgccggaaacgaaggcaccgcgccggcgcagcgccggcccccaagaggagacgggaggggg

SEQ ID NO: 248510 - RNA, 74 nt, Homo sapiens
cacggacaaacaccccaagagggagacggcagagagaccacgaagggaagccccaagccgccagaaaccgaaag

SEQ ID NO: 248511 - RNA, 71 nt, Homo sapiens
ccgaagcggacacccagaccccgccccaagcgcaccacgacaaagaagagaaaacgcggcagagcaacaaa

SEQ ID NO: 248512 - RNA, 66 nt, Homo sapiens
aacagaccgaaagacgcccagggcaagcgcagcggaggccccagaaaacccggcgaacacaccgga

SEQ ID NO: 248513 - RNA, 74 nt, Homo sapiens
acaacgcgacaaaggagagaaacagccaaaacagcacaacagccaaggcgccaccggaagaaacgggaggggag

SEQ ID NO: 248514 - RNA, 86 nt, Homo sapiens
cagaccggcgaggcgccaccaggaaaagcccaggcaagagcaacacgccacaggagccaaggaggccgcgcggcccggagacggac

SEQ ID NO: 248515 - RNA, 83 nt, Homo sapiens
gggaacgggcgagaaagaggaggaggcgagaaaccccaccgacccacagagcagagccacaagagaacaaaaaaagagaaaag

SEQ ID NO: 248516 - RNA, 75 nt, Homo sapiens
caagacagggacagaccaccaaaagcccagcagagcacacgggccggcgagcgcggaggacgggcgacgagaggc

SEQ ID NO: 248517 - RNA, 88 nt, Homo sapiens
cgacgcagagccgagcgaagcagaaacccacaagcgaccccgcgagaacgccaaagccaagacagaccacggggcggagacggacaag

SEQ ID NO: 248518 - RNA, 87 nt, Homo sapiens
cgccggcaggcgcaggagcccgggagccgccgccagggaaaccccccaggcaagaggcgcaggaccgggaagaccaacaaacgcacc

SEQ ID NO: 248519 - RNA, 77 nt, Homo sapiens
agaagcgaaacgccggaaggagcgcaaagaaggaggggaccaaaagaacccagccaacccgcagagggaggggaggg

SEQ ID NO: 248520 - RNA, 81 nt, Homo sapiens
aggagggcggcgcgccgagcgggaacgaagcccaaaaggcagagacggaccgagacaggagagcaggggcccagccacccc

SEQ ID NO: 248521 - RNA, 78 nt, Homo sapiens
gaagagccgggaagcagcaccaacccggcccaccaaaccccgaaagcggcaacggggaagaagacgcgaggacggagg

SEQ ID NO: 248522 - RNA, 87 nt, Homo sapiens
cgagcgcgacgagaaagcggagagcaggggcaccaggagcgaaagagaccaagggcacaaggcaagccaaaggccaaaagagggcca

SEQ ID NO: 248523 - RNA, 78 nt, Homo sapiens
ggagagaaacagccaaaacagcacaacagcccggccccagcaaaccagcaggagcgaccacacacaaagcccagggca

SEQ ID NO: 248524 - RNA, 88 nt, Homo sapiens
gcagccgcgagcccggaggcggcgggaggaggcggcggccggcgggccgaacgccgagcggggcgggcgccccacacgcccacccgca

SEQ ID NO: 248525 - RNA, 81 nt, Homo sapiens
gaaaacaacgacaacgagcacagaagcagaccccacgagcgaaagggaaaaaacgaaggaggcaggaagagcggaggacag

SEQ ID NO: 248526 - RNA, 69 nt, Homo sapiens
cgcagggcgcccggcaagccagaaagcgagcgacggaacacaaacaggcggaaagaaacaagacaacac

SEQ ID NO: 248527 - RNA, 72 nt, Homo sapiens
aacagaacagagcagcagagacggacgacggacaaagaaagccgaaagcaccaaaaccaaagaagaaggaga

SEQ ID NO: 248528 - RNA, 81 nt, Homo sapiens
ggggccaagcccagcccagcggaccaggcagaggcggcgccgccggggacggcagccgcagcggccggacgccggggcggc

SEQ ID NO: 248529 - RNA, 79 nt, Homo sapiens
gacaagagaacagccgcgcggcgagcggcccgcacaaggccggcagggagagaacagcacacagaggcgcaaggggaag

SEQ ID NO: 248530 - RNA, 81 nt, Homo sapiens
caggagggcaccaaacaaaaggaaaccacaccaaccaagaagagccaggcacagaaagcgaagggcggagagccaaggaag

SEQ ID NO: 248531 - RNA, 74 nt, Homo sapiens
gaacaggacgccgcaacgcccaaccaggaggcgcgagaccgcacagcaaggaaagcacccagagaaggaccgga

SEQ ID NO: 248532 - RNA, 71 nt, Homo sapiens
ggaaaaggagccccaccaaggcacacagagaaaaaaagggaacaaaacacagcaagcagacaaaagggggg

SEQ ID NO: 248533 - RNA, 56 nt, Homo sapiens
ggagaacacagaaaccggccccaggcagaagcaggcaacaggaacaagaggaacgc

SEQ ID NO: 248534 - RNA, 80 nt, Homo sapiens
cggaacccagcaccacgagcccagccaccccagggcacaacagggggacggagaacaagggaggcacgcggaggggggag

SEQ ID NO: 248535 - RNA, 78 nt, Homo sapiens
cgccgcgccccgcgcgcgggaagcagcaccaagcacggccaacgccggcacaggggggaaagcccaccgacacccaga

SEQ ID NO: 248536 - RNA, 77 nt, Homo sapiens
gaggaggaaaggaggacgagggcggagaagccgaagggccagaaccacccccaggggccacagcagagggagcgacg

SEQ ID NO: 248537 - RNA, 69 nt, Homo sapiens
gcccgcccggaacaaccggaccgaacgacacggcggaaacgacgcaggagagacacgagaccagaagcc

SEQ ID NO: 248538 - RNA, 69 nt, Homo sapiens
aaacgcacccgaggagggaaaggaaccggaccagacaccgagacaagaagccacccagaggaggaagcc

SEQ ID NO: 248539 - RNA, 58 nt, Homo sapiens
ccgggaccccagccagaacgcagggaaacagccacagaggagacggccagaagacccc

SEQ ID NO: 248540 - RNA, 82 nt, Homo sapiens
cggagaacacgccaagcagcaacagcggcagcacacccccggacagcaagccggccccgagcgaggcaccggacccgacacc

SEQ ID NO: 248541 - RNA, 71 nt, Homo sapiens
cccggggaggcgcacacacaccaaaggaaaccggagaagacacaccacagagcacccagagcgacgccggg

SEQ ID NO: 248542 - RNA, 85 nt, Homo sapiens
cggcggccgaaagcggagagagcgggcgggcggccgggagacccacagcccaggggcacgggcacagcccagaagaccagcgaga

SEQ ID NO: 248543 - RNA, 77 nt, Homo sapiens
cccccccggccggggagcccagcccccggggagcaacgagaagggcaggacgccggcaccggaagccagcgcaggcc

SEQ ID NO: 248544 - RNA, 79 nt, Homo sapiens
cgggaccaaccacccgagcggcgcggacgaaggcaccgggaaaacgcagaggaacgagggggagccacgaggagaaggc

SEQ ID NO: 248545 - RNA, 75 nt, Homo sapiens
ccgcccacagagaagccgcacccggagccagagaacccaaaagcaaacccaagaccgaaagaaacccgggaaagg

SEQ ID NO: 248546 - RNA, 86 nt, Homo sapiens
ggaccacgagacaaggaagagcagcggccaaaacccaacgagaaagcagagcgacccaggaccccgggaggcggagcaccccccag

SEQ ID NO: 248547 - RNA, 85 nt, Homo sapiens
gaaagcgacagagacaaccgcaggagaaaggagaaccgacagagcacagccgcgaagaccagaggacagagcgggagccaccagc

SEQ ID NO: 248548 - RNA, 87 nt, Homo sapiens
ggcggcggggccggggccgcaaggccggagaaggccgccgggcccgggcaggggcggggcaacgcggaagaacgggcgaaaaacgaa

SEQ ID NO: 248549 - RNA, 83 nt, Homo sapiens
acagaggcgggaaaggagcacggccgaagccgggggggcgaaggacgacaagggagcacgagacagcgccggccccaacgagg

SEQ ID NO: 248550 - RNA, 79 nt, Homo sapiens
gccagcacccacccacggacagagcccaacaccaccagagcacggcggccaacaccccggagaagaaggccggcgacgc

SEQ ID NO: 248551 - RNA, 76 nt, Homo sapiens
cccccacacgcccggggaaccagggaaagaacgccggacaacagcggcgaagaaggcaaaccgaaggcccacagag

SEQ ID NO: 248552 - RNA, 87 nt, Homo sapiens
gcgagcaaggagcgcggaacggggagcgccggagcagcggacccaggcagacagaagaggagcacggcggcggaggaagaaagaccg

SEQ ID NO: 248553 - RNA, 77 nt, Homo sapiens
aaaccggaggagacagccccagaagcggaccaccgaaaaaagaccaggcaagaccagcaccgagaaggcagggaaca

SEQ ID NO: 248554 - RNA, 124 nt, Homo sapiens
aacggcggcgcgacaacgccccgagaaccagccccgacacgcccaccggcccgccaagagcaagggccagagaaggaggagaaggagacaggcggcaagcagggcgaagggaggaccagagcca

SEQ ID NO: 248555 - RNA, 73 nt, Homo sapiens
gcaggcaaagggaaaacaaaggaaaagaagaagacggaaacccagagagggacgcaggcaggaaaacaagcca

SEQ ID NO: 248556 - RNA, 77 nt, Homo sapiens
cggcagcagacacagccacgcacgaccgggcgcccaggccccgccgcacgagaacagggaaggggcggcacaccggg

SEQ ID NO: 248557 - RNA, 74 nt, Homo sapiens
accagaggggccggggcacagggcaacagcaagcacaaccaagcagaagagagaggagggcacaaaggaggggc

SEQ ID NO: 248558 - RNA, 68 nt, Homo sapiens
aacacaacaggaacaaccaccgcgaggaccagccccggcgacgggcggcagagaagagaagagcacag

SEQ ID NO: 248559 - RNA, 45 nt, Homo sapiens
cgaccacaacgccggcacgagaacggcaacgaaaagagacacgac

SEQ ID NO: 248560 - RNA, 81 nt, Homo sapiens
cccgggcaggaagacaaaaacagggagaagcaggccacaggggcgcgaggcccgaaggcccaggggcagagagggaaacgg

SEQ ID NO: 248561 - RNA, 77 nt, Homo sapiens
ggcccgggcgggcaccgccgggaaccaccggcacgccaagacaggaggcaaggaggccacggggccgaagacaccaa

SEQ ID NO: 248562 - RNA, 74 nt, Homo sapiens
aacaagaaacacaggcgagcagggacagccaagaaccaaaaaggaccacgaagcaaagagcccgggaagggcgc

SEQ ID NO: 248563 - RNA, 93 nt, Homo sapiens
ggcaagaggacaaccccacacgggacggcccaggaggccagagccacgaagcggcggcggccccgggggccagggggccggggacacgagaag

SEQ ID NO: 248564 - RNA, 39 nt, Homo sapiens
ggaaccaagccaaagacaggaagccccccaccacggcac

SEQ ID NO: 248565 - RNA, 80 nt, Homo sapiens
gcggcggcggcggcgcccccgggcccggcccggccgcggcccccgccgcggcacgaccccacaggagggagagcacggcg

SEQ ID NO: 248566 - RNA, 51 nt, Homo sapiens
ggaaccgcggcgaaccggcgggaccccaagaggacacacggaaaagccggc

SEQ ID NO: 248567 - RNA, 81 nt, Homo sapiens
ccgcagccccgccagccacccccagaggagaggagacgccggagcgggacgaccagagaccgagagcggcgcgcaccgcgg

SEQ ID NO: 248568 - RNA, 81 nt, Homo sapiens
ccgagcaacaaccgccgagcgacggggcggacccagagcgaccaggcgcgccaagccccgccacccagggccacccgggca

SEQ ID NO: 248569 - RNA, 80 nt, Homo sapiens
aaaggcaagagaacagcagcgccgcccgccgacagccaggcccgggagaagggaaaagccccagagcggaaggcgaagca

SEQ ID NO: 248570 - RNA, 81 nt, Homo sapiens
agcagggcacacaggaaggaacaggaggaaaccacagaggaaggagccacaagaccaagcgccacaagggaggaaagccag

SEQ ID NO: 248571 - RNA, 59 nt, Homo sapiens
acgaggccgcccggcccgaggcgagcccaggacacacgagaacgcaaagcaaagaccaa

SEQ ID NO: 248572 - RNA, 77 nt, Homo sapiens
cccccggagccgccccggaggagaaggaagggaccacagaccagcacgccggcgccacgaaccgagcgacaggacgg

SEQ ID NO: 248573 - RNA, 73 nt, Homo sapiens
gggagggaaagggaagacacgaaaaaagagaaagggccaacgggagcagaagggcagcaaaccgaagagagag

SEQ ID NO: 248574 - RNA, 62 nt, Homo sapiens
cagcaaggcggcagagcaaggggcacgcagaaggaccggccacggacaaggcacgaggcgcg

SEQ ID NO: 248575 - RNA, 114 nt, Homo sapiens
agccaagagcagaagcaggagcgcaacaagaagagcagcccaggacgcaaaaggacgaccacgagcagagcgagaaaagaccagaagacacaagacaaggcgcaaggggccaag

SEQ ID NO: 248576 - RNA, 64 nt, Homo sapiens
aggaccaagccagcagaaacagccgagcccaccgcagacggcgcaagaacccaagggcagaagg

SEQ ID NO: 248577 - RNA, 71 nt, Homo sapiens
cccccacgagcgcgacccgaagaccaaaagaaacgcgaagacgacgagcgcaccaagaggaacacaggcga

SEQ ID NO: 248578 - RNA, 68 nt, Homo sapiens
caagaaccgcagggacagaaacaggggggcgcgccagaggacaccagacccaaggcgcaagaaaagga

SEQ ID NO: 248579 - RNA, 56 nt, Homo sapiens
gcccagacgccaacgcaggagcacccagaggacagcagcggacggccggaccaaga

SEQ ID NO: 248580 - RNA, 75 nt, Homo sapiens
gggcgggaaacgcggaagcgggcagcgagaggaagaaaggacacaaagcagaagaaaagccacaaacagaagcaa

SEQ ID NO: 248581 - RNA, 41 nt, Homo sapiens
aaccaggccgccaccgcggcaaagcgaccccgcacacacac

SEQ ID NO: 248582 - RNA, 85 nt, Homo sapiens
ggaagcgcgggcaacgagaagggagaacccgcccggaggaagaaggaaggcgcgggccggggaaggagacggaggcggaccggag

SEQ ID NO: 248583 - RNA, 76 nt, Homo sapiens
cagcccaagcgccccccccgccccccaggaggggcgagagggagccgcagcgagcaggaaaggcccgagccaaaag

SEQ ID NO: 248584 - RNA, 53 nt, Homo sapiens
gagaccgcgcaccaccaggacagcaaagcaaaagcagaccggaaaacccaccg

SEQ ID NO: 248585 - RNA, 63 nt, Homo sapiens
gaccgccagaagagaagggggggaccggcgcacggagagacgcgcgcggccacgccagcgccc

SEQ ID NO: 248586 - RNA, 75 nt, Homo sapiens
cgggggccacaaagccccccggagacgcaaccaagggcagagcacaaacacgggagaaagcagagagcgaaccag

SEQ ID NO: 248587 - RNA, 95 nt, Homo sapiens
cgggccagaacacccgaggggaccagccacaggaggcggccgcacaaagcaaggcggaggcaagacacacaaagcagagagggaaggaaagagcc

SEQ ID NO: 248588 - RNA, 55 nt, Homo sapiens
agcggcgagagcccccacggaacccaggacgagaaaaaacagagcggaacaagcg

SEQ ID NO: 248589 - RNA, 83 nt, Homo sapiens
ggaggcagcggggccgggaggaggacgaaccaacggaacgcggaccaggagcgcgggccaggcacgacaccgcaacgacacag

SEQ ID NO: 248590 - RNA, 50 nt, Homo sapiens
cagagaccaacgagaccgcacagcgccgcaagcgcaaaggacccagccga

SEQ ID NO: 248591 - RNA, 83 nt, Homo sapiens
gcgaacgagcgacggcggaacccggggccgggacgcagcccggcggcagcaggggaacgaaacgcacacccggccccagcagc

SEQ ID NO: 248592 - RNA, 83 nt, Homo sapiens
agggaggcaacggccaaccggcaagaccagacgggaacgggagacaagcgcagcgagcccggaagagggagaccaccagaaac

SEQ ID NO: 248593 - RNA, 81 nt, Homo sapiens
ggagcccgcgcccgccgcgggagagaggggagaaagaagacaaggaaagaacacgaacgagagacagaaggaaaagacgac

SEQ ID NO: 248594 - RNA, 65 nt, Homo sapiens
cgcaccagccgcccaagccgcacagccgcggcggcagcagcaggagaggccgagccaagaacaga

SEQ ID NO: 248595 - RNA, 74 nt, Homo sapiens
aaacagggagccaacccaggaaacgaacggcccgaccagccgaagaggcgggagaacacaccaggaaaggagag

SEQ ID NO: 248596 - RNA, 73 nt, Homo sapiens
cgccggcggccccggagcgccaacgcccggcaagaggaaacaacagaacccaagcaaaggagcaacccacgcc

SEQ ID NO: 248597 - RNA, 70 nt, Homo sapiens
agaaaacggcaaggaagcgcaggggacagaccggcaccagccgcgagggagcacgccgggagacaaggac

SEQ ID NO: 248598 - RNA, 75 nt, Homo sapiens
ggagaaagacacagcccacacccagggcgccagggaccgggcagagggaggaagggccaaaagccaagaagacac

SEQ ID NO: 248599 - RNA, 75 nt, Homo sapiens
agcccgccagccggaccagccgcccagggaagcggggcgggcaaccagaagggcccagaaggacaggagaaacag

SEQ ID NO: 248600 - RNA, 73 nt, Homo sapiens
gacacgagccacagagggcgaaagaaggacaccggcagaagaaagcgggacaacggaggccagcaacaggcag

SEQ ID NO: 248601 - RNA, 58 nt, Homo sapiens
caaacagggcgcagccagaaaaggggagaagcgcaaaggcggcgacggcggcgcgagg

SEQ ID NO: 248602 - RNA, 81 nt, Homo sapiens
gacacccagggagaggaaacgggaacagaaagaaaagccgaaagagcgggaaacaggccagccacgcagcagcagaagcca

SEQ ID NO: 248603 - RNA, 74 nt, Homo sapiens
cggaagccgacccgaccagccaggagaccccgagcagcggggcgcgaagcccggacaccgccagaacccccggg

SEQ ID NO: 248604 - RNA, 80 nt, Homo sapiens
gagccggacacccgggagagggcggcccagaacaagaagaagaagaagcggaggcccagccaggggcgcgcacagacggc

SEQ ID NO: 248605 - RNA, 77 nt, Homo sapiens
cgcgggcggcgggaccggggaagacgccggccgcagacagccccagcacagaggaaagagaaagagccagcaagagg

SEQ ID NO: 248606 - RNA, 80 nt, Homo sapiens
ccagggggcacgcgagggcggcaccccagggcaagggaaaaaagcaggaggaacccggaagaaaaaaaaaacaagagggc

SEQ ID NO: 248607 - RNA, 82 nt, Homo sapiens
ggccgccggcgagccgccaagaggcggcgcagccaccccgcgggaacgcccagcgcgacccccccagcgcccgccccagcac

SEQ ID NO: 248608 - RNA, 72 nt, Homo sapiens
gcccagccccagagagcgggaacagaacacacggcagcagcaggagggccccgagggcccggcccgacacac

SEQ ID NO: 248609 - RNA, 70 nt, Homo sapiens
aaaagacagcccgcagcacgaccagcaggaacggcggggccggggagccccgggccagacccagacccag

SEQ ID NO: 248610 - RNA, 72 nt, Homo sapiens
gaagccagaacagagagagagagaagaagacgaagaagaaggaaaaacggaaagaggaaagacgcccccccg

SEQ ID NO: 248611 - RNA, 86 nt, Homo sapiens
ggacaagccaaggggcgcagaagcacgcggagccagaggccagaagcaggccgggacgaggcagaggggaggagacacgaagcgac

SEQ ID NO: 248612 - RNA, 83 nt, Homo sapiens
gccgaggcaggccgacccggggccgggcagcccgcgcgaccgccaaggagaccgggagagagacgaaggacgcgcaggggcag

SEQ ID NO: 248613 - RNA, 78 nt, Homo sapiens
ccagcagaaggagggacgagaaaagcgacgaggagcaaccaggagccggagaggagcgcacacacaccaccacaacga

SEQ ID NO: 248614 - RNA, 69 nt, Homo sapiens
caaagagagcagcgacaacggccaggagagcgcggaggcgagggcgcccacgggccgcgggcccgccac

SEQ ID NO: 248615 - RNA, 63 nt, Homo sapiens
aaagccaaccagcccccaagaggggagaagcagaccgcaccaggcgggaccccgaaaaagccc

SEQ ID NO: 248616 - RNA, 72 nt, Homo sapiens
gagcgcgggaaagcagcggcagaccagcaggacagcacggccaaacagcagcagaagcgccgcaacagaggg

SEQ ID NO: 248617 - RNA, 68 nt, Homo sapiens
gaaaggcacaaggaaagcaccaacagggacgcagcaacgggcaggaaggaaggaaggcaaagacgaga

SEQ ID NO: 248618 - RNA, 78 nt, Homo sapiens
cgacacacacgaccaggacaagcgccccaaaccagagaaaacaggacaggagaagaacacccccaagagcaaccccac

SEQ ID NO: 248619 - RNA, 71 nt, Homo sapiens
gacacaggaacaggacacagaagaagagcagcaaagccccacaagcaaggcaggaaaccaagggaccaagc

SEQ ID NO: 248620 - RNA, 81 nt, Homo sapiens
gggacgccaccggagaagggaggaaaaccaacaagggccccaggagcacagcaacgccgcggagcccggccgggcacaccc

SEQ ID NO: 248621 - RNA, 82 nt, Homo sapiens
ccaggagacgagagagcgaacgccagggacccggcaggccgcccccggcaagaggcgggaggcggcagaagcagccagagga

SEQ ID NO: 248622 - RNA, 63 nt, Homo sapiens
gggcaacgagcacaacaggagcacgaggaggagagcccagccaagccagaaccaggggcaaca

SEQ ID NO: 248623 - RNA, 70 nt, Homo sapiens
agggacacaccaagcaaaggggagaagcagaccgcaccaggcgggaccccgaaaaagcccaaacagacag

SEQ ID NO: 248624 - RNA, 111 nt, Homo sapiens
gacgccagcacaggaaggagaccacgagccgaggacaaccaacaaaggccaacggcacagaaggaagacagaccgcgaggccacacccaagaccgagcccaagcccgggga

SEQ ID NO: 248625 - RNA, 91 nt, Homo sapiens
cggcaggcccgcccggaagaagcgaccaaagcgccgaggaccggcaacagagcagcccgacggccaggaggcgaagagacgaggaagccca

SEQ ID NO: 248626 - RNA, 67 nt, Homo sapiens
ccccgcagacgggcaggcacccagagagcccagccccgagggaggcagcggcccgggagggaacaaa

SEQ ID NO: 248627 - RNA, 84 nt, Homo sapiens
cgcgcgccacccgcgcccgcccccgcccggcaccgcggacccacccggacccggcggggagaggagaaacgccaagagcgagcg

SEQ ID NO: 248628 - RNA, 51 nt, Homo sapiens
gcgaaccgaaggcccgaaggcacaggcgaccgaagccaccgacaaggaaag

SEQ ID NO: 248629 - RNA, 66 nt, Homo sapiens
cgggacgcggcggcgccggccccggggagaaacgaacgccaacggcaagaaagggaaggccgcaaa

SEQ ID NO: 248630 - RNA, 40 nt, Homo sapiens
cgccacacaccaaacgcaagaaggacccaccagagcgccc

SEQ ID NO: 248631 - RNA, 54 nt, Homo sapiens
ggaccaagaaccagcccaccggcacagccacccgacggaccacggaacaggaac

SEQ ID NO: 248632 - RNA, 81 nt, Homo sapiens
gcaacagcacaaccacgagccaaacaaccagcccaaccacacgcaacaaccagcagcacagagggcgggaacgcggaagaa

SEQ ID NO: 248633 - RNA, 72 nt, Homo sapiens
gaagccacagcaacgagacagaggagcgacagacagcaccaagaagaagcaaacggacacacccaggcgcac

SEQ ID NO: 248634 - RNA, 91 nt, Homo sapiens
gcgagccacgggggccgccgcagcaccaggcgaccaccgcagcaccagcgcgggccggaaggacgcccagagaccggcagcgcaaacaccc

SEQ ID NO: 248635 - RNA, 54 nt, Homo sapiens
agcccggaaccacaggaaccaacccgcccccgggcggggcacaaagcgaaggca

SEQ ID NO: 248636 - RNA, 41 nt, Homo sapiens
gggaaaggagagcaccacacaagaccaggaaccagagagaa

SEQ ID NO: 248637 - RNA, 77 nt, Homo sapiens
gaccagccgcggagccgggggcagcgccgaaaagcgaaaagaaacaagccgcggcaacagcgaccccaagccagaca

SEQ ID NO: 248638 - RNA, 60 nt, Homo sapiens
cgcaagggcgaggcagccccaaacaccgaagagacaacagccacaagggacaaaaggaag

SEQ ID NO: 248639 - RNA, 74 nt, Homo sapiens
caccgacccgacgcgccggcccacgcgcggccaagggcagcggggaagaagaaaaggaaccgaggccccccggc

SEQ ID NO: 248640 - RNA, 74 nt, Homo sapiens
ccacagagcaccagcagcacgggcggccggagcacagcagggacagggaaagcaacacaacaagagagaaggaa

SEQ ID NO: 248641 - RNA, 64 nt, Homo sapiens
gccccacagaggggcgacggcgggcgcggacggcaggggcgccggggaacccgcgggaagaagc

SEQ ID NO: 248642 - RNA, 65 nt, Homo sapiens
gggaaaggaaggggccccagggcgcagacaaggcaggccaggcaggacaggggggagcagcagca

SEQ ID NO: 248643 - RNA, 73 nt, Homo sapiens
gaaggaccaagaaccagccaaggcaggccagcagaggcaccaccagcccaagcaacagacaccaacagcagag

SEQ ID NO: 248644 - RNA, 73 nt, Homo sapiens
aggacccaaaaaacagagcacgcgaccagcgaggagcaacacaggagccggagggcgagggacaggccgagcg

SEQ ID NO: 248645 - RNA, 75 nt, Homo sapiens
gaaacaaaaggccaccgaagagagacaccaacaacagacaggacccgggagcaacagcacaaagggacagcaacc

SEQ ID NO: 248646 - RNA, 79 nt, Homo sapiens
ggaggaaaaacaaaaaggcacagaagggacacagcagggcaagagcgaacgagcaaacacagcaagggagagggggacg

SEQ ID NO: 248647 - RNA, 75 nt, Homo sapiens
gccgagaaaggaagggcgggaccaacagggagccaggcaccggcacggaccaccccaacaccgggggagaaccgg

SEQ ID NO: 248648 - RNA, 76 nt, Homo sapiens
cagacccaggccggcccagggcccagacacaggaacgggcaccccaagagcaaagaggagaagagggaagcagaac

SEQ ID NO: 248649 - RNA, 81 nt, Homo sapiens
gaagacccagccagaccagggacaaagagcaaacagacagggccgcaggggcaaagaaaaaggagagaaaaagaggcaaaa

SEQ ID NO: 248650 - RNA, 73 nt, Homo sapiens
gccaagcagcagaagagcaaggaggcggagggagagcgacgggccacgcaaccgccccggggccagcgacccg

SEQ ID NO: 248651 - RNA, 50 nt, Homo sapiens
agacagcccgcagcacgaccagcaggaacgggaagaaagcacgggaaaag

SEQ ID NO: 248652 - RNA, 85 nt, Homo sapiens
cccagggcagcagcagcagacagcagacagacagccaggcgcccagaggggccccggagccagacaagcagaccggaagaccgac

SEQ ID NO: 248653 - RNA, 83 nt, Homo sapiens
gaaagaacggggagcagcagcgagcaggcgaccccgcacacacacccaccagccacggcagcccagcggggacccagccgccc

SEQ ID NO: 248654 - RNA, 74 nt, Homo sapiens
cccgacagaagccacaccaccccggaggaccagaagcccaggaggcaagcccacagcgcagccgcggaaggcca

SEQ ID NO: 248655 - RNA, 77 nt, Homo sapiens
cgcagaacccgggagaggagaccagaacgaacccccccccccgggcgaagaaaaaaccaacagaaccggaagcgcca

SEQ ID NO: 248656 - RNA, 76 nt, Homo sapiens
gaagagccagcacccaacgagcaccggagacgcgggcagaaaaaggaaaggaaggcggcgggggagcacgaggagc

SEQ ID NO: 248657 - RNA, 81 nt, Homo sapiens
ggaacaggcaaagagagagacagacggacgggcggggcgcagccgcccccacccacgggggcaggacaggaagggaagggg

SEQ ID NO: 248658 - RNA, 81 nt, Homo sapiens
ccacgagcaccgaagagcgcgccgcccccgaagggacaccacaccgcccaccgggaacagggcaacacacaagcccaacaa

SEQ ID NO: 248659 - RNA, 83 nt, Homo sapiens
ggagagcagccaaggggaagaaagaccagcggaggcccgcagccccaaggacagccagcgggcaagcggacccacccagggcg

SEQ ID NO: 248660 - RNA, 77 nt, Homo sapiens
cccggggcgcggagggccgagggagggccgagccagccgcggccggaggagcccccaggccgacgaagaaaccgaac

SEQ ID NO: 248661 - RNA, 55 nt, Homo sapiens
caacgcgagcagaacagcccagccgggacgcacagaaaagacaaaacaaagacgc

SEQ ID NO: 248662 - RNA, 68 nt, Homo sapiens
cagcaagagcacccgacccacaggccagagaggccaagccgacgccagcgggcgccacccaacaggcg

SEQ ID NO: 248663 - RNA, 70 nt, Homo sapiens
cagaccgcagaacccaaaggcggcacagaacagagggaagaaggaggccgaccaggccgacaaagcagac

SEQ ID NO: 248664 - RNA, 78 nt, Homo sapiens
gcgcgcgggacggccgaggaaggaacggcccccccccagcccgccccaaaaggaggaagaaccaacagagaaaaaaac

SEQ ID NO: 248665 - RNA, 79 nt, Homo sapiens
gaaccagaaggaaaaaaaaggaaggggaaaagccagacaaaggcccccaagaggccccagggacagcggaggaagaaga

SEQ ID NO: 248666 - RNA, 68 nt, Homo sapiens
gggaacgaagaagcgccccgacaccaggaaaacccagaaagcaagcagaagaaaagcaagaaaagaag

SEQ ID NO: 248667 - RNA, 96 nt, Homo sapiens
caagcaggaggagaacagcgacaaaggaagaagccgaaaaaaggggcaggccggccccgcaagcggcgcggcggaagagagagccacggggcggca

SEQ ID NO: 248668 - RNA, 55 nt, Homo sapiens
gacagggaggaacgcggggaggaggaggacagcgaagaaacaggggagaaacccc

SEQ ID NO: 248669 - RNA, 85 nt, Homo sapiens
acaggcaccgcgcccacaaagaaaccgcaggaaacgagccggacagcaagaaagcaccagccaagcagaagggagccagcggacg

SEQ ID NO: 248670 - RNA, 70 nt, Homo sapiens
gaccaggaagaaaacgccagaggagaaccaaaggaacagggggcaagcaacacacgcagaaaggcccgaa

SEQ ID NO: 248671 - RNA, 81 nt, Homo sapiens
cgagccgcgaggagcgcacccgggccccgaggagcggacaaagccagaggcaggaagaagaagacgagacagggcgaacca

SEQ ID NO: 248672 - RNA, 75 nt, Homo sapiens
gggacccgccgagcccacccgccggagggacgcggagggccaacaacacacccccccaaggcggcccacccagca

SEQ ID NO: 248673 - RNA, 68 nt, Homo sapiens
cccccgagagcggaaacagaaggccagcaaaaaaggccgaccggagggaggagccgagaacgcagccc

SEQ ID NO: 248674 - RNA, 77 nt, Homo sapiens
ggaccgggccaagacgagcgacaggagcacacccggagaagcaggagcccaccggcagggcaccacccacacaagga

SEQ ID NO: 248675 - RNA, 81 nt, Homo sapiens
ccaggggccagagcgagggggccgggcggcacggcacagacagggacccgagacaggggcaagcaagcacaaaccacaagc

SEQ ID NO: 248676 - RNA, 62 nt, Homo sapiens
agacccaccgaacggcagcgaaaacaggggcacagacgacagaagccaagagggcgcaaaga

SEQ ID NO: 248677 - RNA, 74 nt, Homo sapiens
gcgagcgcacgcgcgcccgaagggcaacgccgcccaacacggagccaagaccgaagaaaacacggaaaaacgac

SEQ ID NO: 248678 - RNA, 80 nt, Homo sapiens
aaggagggggacaccggggagggcgggagagcagccagcggcggacaaccgaaagcccgggcgaagcgcagcagaaagga

SEQ ID NO: 248679 - RNA, 85 nt, Homo sapiens
caagaccaccaaaaagccaccgcgcgcgcccgaccgcgcggagaccggaccgcgccacaaggagagggcggagggggcagggcag

SEQ ID NO: 248680 - RNA, 70 nt, Homo sapiens
gaaccccagcagagggccccccgccaccaaaggcccaggagagagggaaaggggacgcccccccaggcgg

SEQ ID NO: 248681 - RNA, 75 nt, Homo sapiens
ccaccgacagcaagaacgacgaccgcgcccagaagcgaagggagagcgccagagaaggacaacggcaagcggaga

SEQ ID NO: 248682 - RNA, 59 nt, Homo sapiens
acagaaagcgagcagagcccgcgaacaagacaagacagacgagaacaaggcaagaaacc

SEQ ID NO: 248683 - RNA, 71 nt, Homo sapiens
aaaggacacaggaaccgcagcacaaaagggaaggagggacgcacgagagaaacagcaagaaaccccacagc

SEQ ID NO: 248684 - RNA, 78 nt, Homo sapiens
aagaacgcaagaaggaacaaacaaagaggggccgaagccccggcccgaagcacagggcagaacacacggcagcacaag

SEQ ID NO: 248685 - RNA, 74 nt, Homo sapiens
ggacaccgccccagacaagggccggggcaacgaagaaaacaaaagccgcggcggagaaaccaccacaaacacga

SEQ ID NO: 248686 - RNA, 63 nt, Homo sapiens
ggccccaacacccggagcagcgccacaagggacaggcaaagcagcgacccccaggaaagcacg

SEQ ID NO: 248687 - RNA, 52 nt, Homo sapiens
acccgaagcccccaaagagagaaccggagagcacccaacacaacccgagccc

SEQ ID NO: 248688 - RNA, 68 nt, Homo sapiens
aggaagcccccccggcacgacaccgccccaacccacgagaggacagcccagcacaggaagaaacgcca

SEQ ID NO: 248689 - RNA, 74 nt, Homo sapiens
ggggagacccggggacccccgacgccaggcagcgcccccaaacgccgcggccgcacgagcggaaggacgaacac

SEQ ID NO: 248690 - RNA, 84 nt, Homo sapiens
caggcgccgggcgcggcgcagcgccgaggcgggcgaggcgccgcggaccagaggcgccgaaggaaacccacgccaagcgcacgg

SEQ ID NO: 248691 - RNA, 32 nt, Homo sapiens
aaagaacacacacagagcacagggacaggccg

SEQ ID NO: 248692 - RNA, 83 nt, Homo sapiens
agagaccacccgaggccaaggccgaggcacgccaaagaccgaaggagaagaaggagaaggggaggagaaggcaagccggaaag

SEQ ID NO: 248693 - RNA, 75 nt, Homo sapiens
cgccgccgacacgcggggcggggggcccacgggcggcccaccccagcagaacgcgggaccgaaggacgaacagag

SEQ ID NO: 248694 - RNA, 92 nt, Homo sapiens
ccagcgaaagacaaccgcccccagcgaagaccggagagaggaagggcccccgaagagaaagaaaccggaacagcgggaagcaggaccagaga

SEQ ID NO: 248695 - RNA, 73 nt, Homo sapiens
aagaaggccccgggaggccagagaaggaggggaacccacgcaacccaacaaagaaccggaagggggccagacg

SEQ ID NO: 248696 - RNA, 79 nt, Homo sapiens
ccgcaagaagccacccaccgacgccgacaggcagagccgcaacccgagacggaaagaacaggccaagaaaagccaaaga

SEQ ID NO: 248697 - RNA, 58 nt, Homo sapiens
ccgagaaacgggaacgagcacagggggaaggggagaaaagagcagaacacaaaaaaac

SEQ ID NO: 248698 - RNA, 53 nt, Homo sapiens
gaacggcacgaaaaggcaacacacaagagaaggaaaagcgagcgagcccaggc

SEQ ID NO: 248699 - RNA, 78 nt, Homo sapiens
cggcagccgggaaggacacgcccacgaccggaaaaaaggaaccgcgagaaagggccaggaaagaccaccagaccaaca

SEQ ID NO: 248700 - RNA, 67 nt, Homo sapiens
cgcccgggccagcggccgcgcacccccggccggaggcaccagccccggcggcgcggccgcccacgcc

SEQ ID NO: 248701 - RNA, 72 nt, Homo sapiens
cacgggaccaaggaaaagggaaacgaaaagagacagcagggcaaaacgggccacacacagggcaaaaagaac

SEQ ID NO: 248702 - RNA, 65 nt, Homo sapiens
ggccgcccgaccagccccagcgaccgcccgaggccgaaaccgagcaccagaacaccgagaagaag

SEQ ID NO: 248703 - RNA, 38 nt, Homo sapiens
acacggacaacaaacggacaggagaaggcggggaaaaa

SEQ ID NO: 248704 - RNA, 64 nt, Homo sapiens
cacaccccgcaggaaccggaaacgcacaagggaggagcaacacaaacaccggccagaagaagaa

SEQ ID NO: 248705 - RNA, 75 nt, Homo sapiens
caccaccacggaacgccaaccggcggaccgcgagacagccagccgaccgagacaacggcaagcggagaagagcaa

SEQ ID NO: 248706 - RNA, 72 nt, Homo sapiens
cggcagaacgagcaccccccaggaaagccaccacgccacacaccaaacgggcggagaacggaaaagcaccag

SEQ ID NO: 248707 - RNA, 86 nt, Homo sapiens
ccgagcccgggaacggcggcgggacggcggccccgcgcagcccccggccgcagcgcaggcagcccagcaggagacgcgcggcgccg

SEQ ID NO: 248708 - RNA, 36 nt, Homo sapiens
acaggaaccggcccggggacacaggagaaggaccca

SEQ ID NO: 248709 - RNA, 71 nt, Homo sapiens
cacagagcagccggacgccccgaccaaggaacgcgaagagacccccaggccaaagcacccaaaaaccagcc

SEQ ID NO: 248710 - RNA, 60 nt, Homo sapiens
gagggggaccgcgggggaccaacgagaaaggcaacaccgggcgcgcacagaagggacaac

SEQ ID NO: 248711 - RNA, 96 nt, Homo sapiens
gagggggacagcgaggaccaccgagcaggcagccccgggcgccccacaccaccacgggcggggaggaaggcccagaacaaaggcagaacgggggaa

SEQ ID NO: 248712 - RNA, 71 nt, Homo sapiens
aaggaggcaacaagggagaagcagcaacggggcggggccccagacccacgaaaaaggaacaccagaagcca

SEQ ID NO: 248713 - RNA, 80 nt, Homo sapiens
cccccccgacgacgacggcccgacgagccaggggaggaccgcgccaacaggacgaggagaccgaccaggagaccccagcg

SEQ ID NO: 248714 - RNA, 55 nt, Homo sapiens
ggacccagcagccgcgcccaggccgcagcagcagggcccaagagacccagcagac

SEQ ID NO: 248715 - RNA, 77 nt, Homo sapiens
aggaacgagaaagaggaaagccacaacggaaccaacggaagagcagagagggccaccacccgaaggaagcaccagga

SEQ ID NO: 248716 - RNA, 117 nt, Homo sapiens
cacaagggggaggggcggaggcggacccacccggcgcaccgggcacggaggcgaagaggaaaaacagaaagccgagggaacaaaacccagcgaagcggcgagacgagaacagaagaa

SEQ ID NO: 248717 - RNA, 89 nt, Homo sapiens
ccgggagcgcggggcgggggcgcccgccgcgccgccacggacccaaagacaggaccacgcaccagcagagaaggaaagcaaaccgaagc

SEQ ID NO: 248718 - RNA, 81 nt, Homo sapiens
ggacgcagaaagggcagacacaggcacaccaagggcccgacggagcagcagcgccgggaaggaaagcacacaggacagaag

SEQ ID NO: 248719 - RNA, 74 nt, Homo sapiens
gcgaacagcgcgacacaggaggccaagggaggaaaaagcggcacagaggaagaggcccaccccaggagaacaaa

SEQ ID NO: 248720 - RNA, 87 nt, Homo sapiens
agggacaaagagaggagcagaaggccgggacagcagaaaacagccagcagaaaaagccaaaaagcaagcggacaaaagaagaaacaa

SEQ ID NO: 248721 - RNA, 78 nt, Homo sapiens
cgaggccggggcccagccggaggcggccagaccaagaagaacagccccagaaaggaagaagcgaaaagcaaaaaacgg

SEQ ID NO: 248722 - RNA, 69 nt, Homo sapiens
cgcggaaggcagcgcccagcagcgcagagggacccccaaaggacacaaggaagaacaacccgaacgggc

SEQ ID NO: 248723 - RNA, 44 nt, Homo sapiens
cggaagagcgccccaggagaaacaagacgagaccagaaacgcac

SEQ ID NO: 248724 - RNA, 89 nt, Homo sapiens
gggacgcgcggggggcggggacccggagcaagcagcgacgccagcggcggagaaccgacgaaagaggagcaccggcccaggcggaggca

SEQ ID NO: 248725 - RNA, 77 nt, Homo sapiens
ggagggcccagcgcaccgacaggcccgcgcccgggggccgccgcccggccgcccgcccggacccccccgcccacccc

SEQ ID NO: 248726 - RNA, 80 nt, Homo sapiens
cacacgcccgccgaccgccacacaccagcagaggaggcgggggcagccgcgagacggcacaagcgcagaaggccagacac

SEQ ID NO: 248727 - RNA, 95 nt, Homo sapiens
cggcagggggaaccagcccaagccagcaacacaccaacaggaagcggccccccacacagcagcaaagccgccgcagggaagagaaccgacgagca

SEQ ID NO: 248728 - RNA, 87 nt, Homo sapiens
cccccaacaggaagaggaacccacgaaaaggagggagccaaagggacagggaggccgcacagaggaggagcaccaaaccgagggagg

SEQ ID NO: 248729 - RNA, 66 nt, Homo sapiens
acagcaaacccacccagcacaccccgcgaaaggaggaggcacagaggccacaaagcccagacaagc

SEQ ID NO: 248730 - RNA, 74 nt, Homo sapiens
ccaccacagaaacaaaagcaacaaagagggggccgcaaggccaggcgcgcagaggcacccaacggcacagaccc

SEQ ID NO: 248731 - RNA, 79 nt, Homo sapiens
caaaaaccaagcaccagagccccaacagccccgcggccacagcgcaaggccaaggaaaaggaacagagagagcagaacc

SEQ ID NO: 248732 - RNA, 75 nt, Homo sapiens
agagcgagcgagggggggcgcgccggaaaccggagcgcgcagcagggaacagcccgcccaggcggggcaccagca

SEQ ID NO: 248733 - RNA, 58 nt, Homo sapiens
aagaagcgaaaccagcaccaccacggcagcggcaggacgcagaagagaccaagcaaga

SEQ ID NO: 248734 - RNA, 76 nt, Homo sapiens
ggggccaggcccagggggcaagaccaaccagccggcacaccaggccaaagaccacgggggccaaacaccaggagaa

SEQ ID NO: 248735 - RNA, 77 nt, Homo sapiens
ggcggggcaaccaaggaaaagacaagacacgggaaaagagcccgagcgaagagaggaaggacaggacaagccaaggc

SEQ ID NO: 248736 - RNA, 77 nt, Homo sapiens
accccaagaggcgagccagcagaagaaaaggacggcggacgaacccaaccccagagacagacccacccacccccagc

SEQ ID NO: 248737 - RNA, 60 nt, Homo sapiens
cgcccggccggagccagggacaaggggagccagccaagacacggagccaaaaagaagaaa

SEQ ID NO: 248738 - RNA, 75 nt, Homo sapiens
ccgagcgaacgcgcaacagggccgcacgcaaggaaacgagaagaacgaaagagaaacccaaaaaaaggagcaaaa

SEQ ID NO: 248739 - RNA, 86 nt, Homo sapiens
cagcggggccccaagaagccgagacacgcgggaggcggcgacgggcccgggaccgcacgccaagagaagaaccagagaaacagagc

SEQ ID NO: 248740 - RNA, 71 nt, Homo sapiens
gaaacgaagagaaaggaccacggaaaaaccgaggagaaagaagacaacgaagagaggaaagaagcggaaag

SEQ ID NO: 248741 - RNA, 39 nt, Homo sapiens
aacaaggagacagccaggggcggagaacggaaaagcacc

SEQ ID NO: 248742 - RNA, 63 nt, Homo sapiens
agaacgacccaaggaagggagagcgaaaaggccaagacccacgggaccccggacaggagcaga

SEQ ID NO: 248743 - RNA, 69 nt, Homo sapiens
accaagccaacgaggccccgcagcgacgacggacagcaaggaaccccggggacagcagacgcagagaca

SEQ ID NO: 248744 - RNA, 67 nt, Homo sapiens
caccgcagccggcgacagcacccggccaggagaagagaaacaccccagagcgaaaggcgcggagcga

SEQ ID NO: 248745 - RNA, 60 nt, Homo sapiens
gcaaaggcggaggcggaaggggaaagccggagccggccacgcggagccagcgcccggcaa

SEQ ID NO: 248746 - RNA, 84 nt, Homo sapiens
gcgaggaggagaacccaccaagccccgcaggagccaccagacggagcagagcagcaaaaaacccagaaggggagaaagaacacg

SEQ ID NO: 248747 - RNA, 71 nt, Homo sapiens
agccccagcgaagcagcacagaaagaaaaaagcgcgccaagaagcgagaaaggaagacagaccgcgaggcc

SEQ ID NO: 248748 - RNA, 77 nt, Homo sapiens
gaaagggcagacacaggcacaccaagggggaaacagacggcgggaagaaaagcacaaagcaacccgacaaaggcccc

SEQ ID NO: 248749 - RNA, 75 nt, Homo sapiens
aaaacccagaccgaccccaccggacaccacaggcaaacacggagaagcgacacgaagcaacagccacacagacaa

SEQ ID NO: 248750 - RNA, 49 nt, Homo sapiens
gaaccggaaaagacaagggggcaaagggagcgaagaggaaagaaagacc

SEQ ID NO: 248751 - RNA, 64 nt, Homo sapiens
cggacccgaccaagaggcagaagacggggggcggggagaccgcggggggagcccgcggccgggg

SEQ ID NO: 248752 - RNA, 35 nt, Homo sapiens
ggcccaggacagaaaccagaccggcggccaggcgg

SEQ ID NO: 248753 - RNA, 73 nt, Homo sapiens
cggacaaaacccacacgacagggcaccccaaggacccgaaagagagcagcaccgccccggaaagcaaacagaa

SEQ ID NO: 248754 - RNA, 40 nt, Homo sapiens
ggcagccaccgggccccgagggccgccgcgcccaggcgga

SEQ ID NO: 248755 - RNA, 85 nt, Homo sapiens
ggccccgagccagccgggaggacacacacagcgccagaagcaccacggaaaccagggaaccggagaaagacaggccggccacgag

SEQ ID NO: 248756 - RNA, 76 nt, Homo sapiens
caaagcgggagagacggaccagaccagggccgagcacagacccagccccgggccggcggggagacccacaaccccc

SEQ ID NO: 248757 - RNA, 77 nt, Homo sapiens
ggcaacggaggcagagaaaaggacagcaccccacggaaccaggaaagaaaggcaaagcgagcaagagggagaccaac

SEQ ID NO: 248758 - RNA, 62 nt, Homo sapiens
ccccgaggccccgaccgcggcggagcccgacccacccaagggcaaagaccaaaggaggacga

SEQ ID NO: 248759 - RNA, 72 nt, Homo sapiens
gaccacgcccggcagcaaagaccccaggggcgccggccgaaaggacccggagcagggcaaggggcccggcag

SEQ ID NO: 248760 - RNA, 73 nt, Homo sapiens
ccgcccaagcccgggccagggccaccccggcgagacccaaagcggaaaacccgcaagggccagcaaaaccgca

SEQ ID NO: 248761 - RNA, 68 nt, Homo sapiens
gaccccgcgacccgaggcgagcgacccggggcggccggagcaccggccgagaaggagggccaaagagc

SEQ ID NO: 248762 - RNA, 79 nt, Homo sapiens
acaaagccgaagaccccggagccccagccagggaaccacggagcacgagaaaacggcgggagcaacaccgccggaaccg

SEQ ID NO: 248763 - RNA, 47 nt, Homo sapiens
gagaaaccaaaagggccaggagagacacagcccgcacggagaaggca

SEQ ID NO: 248764 - RNA, 80 nt, Homo sapiens
cgcaagccaaaggcaagagcgggagcagagaaaaagagcggcgaggaacccagaaacaagggcaggacccgaggcgccag

SEQ ID NO: 248765 - RNA, 73 nt, Homo sapiens
gccaaaggggacacccggaggcggcgcagcagcaccggagaaaaccggaagagaaaggccgggaagcaggaaa

SEQ ID NO: 248766 - RNA, 80 nt, Homo sapiens
aaaggaagaaaacagaaaacaccaaaaacagcaaaagcaaaaaggaaggcaagaagccagaggagcggccgcgcccaggc

SEQ ID NO: 248767 - RNA, 65 nt, Homo sapiens
agaggaagaagaacgacccgcccggggcagcaggaccaccgggccgggaccgacccacccccgcg

SEQ ID NO: 248768 - RNA, 89 nt, Homo sapiens
ccaagaggcggccaaggggacgagcaaaggaagcgcgaacagcagcgcaggacccaaagacaggaccacgcaccagcagagaaggaaag

SEQ ID NO: 248769 - RNA, 51 nt, Homo sapiens
gagaaaagaaaaccggagcccggagcaaaagaaaacgagaaagccgaccaa

SEQ ID NO: 248770 - RNA, 73 nt, Homo sapiens
cagaagaggcgaccggcaggaagcaggaagcagaaccagcaagacaagcggagagaacaagcgcccaaaaggg

SEQ ID NO: 248771 - RNA, 73 nt, Homo sapiens
gcaccgcacaccggaccaggaaacggaggcggacggagccaccaccaccccgagagacggaccggaccacccc

SEQ ID NO: 248772 - RNA, 75 nt, Homo sapiens
cccggggcgcgccccgagagaacgaggaggagccccacccgcgcaggacaacgcagcagacagacaacaggccaa

SEQ ID NO: 248773 - RNA, 69 nt, Homo sapiens
agcaagaggaagagaagcagagcgaagcaaagaggaagcgaaggggacccagaacaagaagaacaagag

SEQ ID NO: 248774 - RNA, 78 nt, Homo sapiens
gaggcgccggcgcggcagcgagcggcggaaccccgcggcgggagcgcggcggggccgcagagaggcaaccgcgaagca

SEQ ID NO: 248775 - RNA, 57 nt, Homo sapiens
aaacccaagaacggggaagaagaaagggacacagcgagagaggcagggacgagcaga

SEQ ID NO: 248776 - RNA, 53 nt, Homo sapiens
aagacccgccacaagcaacgcgggaagagaaggaaacgggcacaaggacaggc

SEQ ID NO: 248777 - RNA, 80 nt, Homo sapiens
ccgcaccggcgccaacccacaacaggcccagcgcggcgcaggagaaccgagagacccgggaccggagggccggggagaga

SEQ ID NO: 248778 - RNA, 71 nt, Homo sapiens
agcggaagcccaaacgggaaaagacggcagcgaacgagaagagcaaggcgccaacgcccagaaaggcaggc

SEQ ID NO: 248779 - RNA, 84 nt, Homo sapiens
gaccacgcgccaccagaagagggcgcacaaagaaggcggcccacaagcggaggagaaggcagagcccccccaggcagaagcccg

SEQ ID NO: 248780 - RNA, 77 nt, Homo sapiens
ccccagacagcaaggaaagagcgcccaagacagcccagcgcaagagagacgggggccaccagcgcccccaggccgag

SEQ ID NO: 248781 - RNA, 76 nt, Homo sapiens
cacacgcagaagggggaaagagaccgggacagaacaggcccccacagagagcacacaaacaaagcgaaaccacgga

SEQ ID NO: 248782 - RNA, 81 nt, Homo sapiens
gccgcggggcagcgggccggcgccggcgcgacccagcaggcgaagaagcagcagcccaagagcagacaggcaggggaggag

SEQ ID NO: 248783 - RNA, 70 nt, Homo sapiens
cgagggcggacagcggggcccgcggaaaacaggcccccacggccccaggagaaagcgcgggcgaccggcc

SEQ ID NO: 248784 - RNA, 76 nt, Homo sapiens
aaagaacagagacaaaggaccaaagcgagggaaaaggccaaccaagcggagagcaaaagagggggagcacagcgag

SEQ ID NO: 248785 - RNA, 81 nt, Homo sapiens
cgaggggcgcagcagggcggcgccccacgccagcgccgggggggggcccgaaggggccccacagacagagcccgaaagagg

SEQ ID NO: 248786 - RNA, 84 nt, Homo sapiens
cagccgagagacccagcggccggacagggccagcgcgggccgccagcggcggccaccacagcgccgcagcccagcgaggcccag

SEQ ID NO: 248787 - RNA, 39 nt, Homo sapiens
gggggggcaaacccgagagaacggagacaaaggaggcac

SEQ ID NO: 248788 - RNA, 71 nt, Homo sapiens
gacacgggaggagcgccacacccacacacaagagccaggacaaaaccaggcagaaccaacacgaacccaag

SEQ ID NO: 248789 - RNA, 105 nt, Homo sapiens
cagcggggcggcgcgcggcgcggcggcggcccgccccgcggcccaggggagaaccgccagcgacgggaaggcaggacccacgcacgagcaacgagaagagagaag

SEQ ID NO: 248790 - RNA, 71 nt, Homo sapiens
gaggcgcggaggacgccccaccgccgacgcccccagccaccagcccgcggcgccaggccacgcggccccgc

SEQ ID NO: 248791 - RNA, 91 nt, Homo sapiens
gagaaccgggagccgggggcgccagggccaggggcagccagggggccagagagggccagagccgagcaaagagcaccagacacgccacccc

SEQ ID NO: 248792 - RNA, 58 nt, Homo sapiens
ccgggcagcaagggggaggcccccaaggcgaagcaagcacgaaagccagagcgaaaac

SEQ ID NO: 248793 - RNA, 85 nt, Homo sapiens
ggagcgcgaaggccgggacccggccccggcccacaggggggggcaaacccgagagaacggcggagaggagcgaagagcgaagcca

SEQ ID NO: 248794 - RNA, 73 nt, Homo sapiens
gagggacaggagccgccccgggcgccacggcgacgcccagagcagcccgggcgcaggcagccaacccaaggga

SEQ ID NO: 248795 - RNA, 60 nt, Homo sapiens
agccaacgagcacgggccaaggagaggccagaggaaggccagaacacccgaccccaccgc

SEQ ID NO: 248796 - RNA, 85 nt, Homo sapiens
ccccaaaagcacgcacgaaaccggcaagccagcggaggggagaagggcaccaggagcaaggacgggaagagaagacgcgggagcg

SEQ ID NO: 248797 - RNA, 91 nt, Homo sapiens
ggggcggccggggccgcgccgcaccgcaccgcgcgggcggccaggagcgagccagggcccgacaggcaaggaaccggagcaaacgacccga

SEQ ID NO: 248798 - RNA, 82 nt, Homo sapiens
gacaaggagggaagcggccccagcaccccagcgcgcagggccgccaggggcgccgagaagaaggcagccaggagaaccagac

SEQ ID NO: 248799 - RNA, 73 nt, Homo sapiens
agaacccaccaaaccaacacccagccaaggggcaggagagaagggagcgaacacagaaaaacacggggacgag

SEQ ID NO: 248800 - RNA, 53 nt, Homo sapiens
cacgaaagcccaggccaaaaagaggaaacgaagcaggaaacccagcgaaggca

SEQ ID NO: 248801 - RNA, 47 nt, Homo sapiens
cccggacagcagggagacgcgagcagcaccgcacccacaaagccaag

SEQ ID NO: 248802 - RNA, 83 nt, Homo sapiens
cgacaggccgcagcacacaaagggggagcgggccggagagaagagaggggcgcgaggagaaggaaacaggcccggaggcccca

SEQ ID NO: 248803 - RNA, 84 nt, Homo sapiens
aaacgcccaggaaaagccagagcgccaggagcagcaaaacacacaaagagggcagcacggggagaacggaaagcaaaccaccag

SEQ ID NO: 248804 - RNA, 55 nt, Homo sapiens
agcggacgcgaagcagggacacaggaggaccacaaccagaagacgggggccaccc

SEQ ID NO: 248805 - RNA, 86 nt, Homo sapiens
gcgccggcaagcgccggagcccgcgcgcgccgcggagcaagcgcggagcgcgcccggggggacagagcacaggaaagggaccccca

SEQ ID NO: 248806 - RNA, 74 nt, Homo sapiens
cggcacagccagaagaccgaagcgcgacggaagaaagacagaaccagcacagcaaaaaaggcagcgcaccgacc

SEQ ID NO: 248807 - RNA, 57 nt, Homo sapiens
caggggcacccgggaccgcggcgagaagccccagcgcacacgcggccgcgaagagcc

SEQ ID NO: 248808 - RNA, 60 nt, Homo sapiens
cccaacacagagccaagcgccaagaaaaggaccagcgcagccagacaaaacacgccaagg

SEQ ID NO: 248809 - RNA, 77 nt, Homo sapiens
ccggagagacagagccgagaaccaccacgaccacaggagggaaagaaacgggaaacggccgagcgaccaggagagga

SEQ ID NO: 248810 - RNA, 71 nt, Homo sapiens
caaaagcagacccaaccaaggaaaggcacggccacgacagcgacgcagagaagccccagaggggaagaaac

SEQ ID NO: 248811 - RNA, 80 nt, Homo sapiens
cccagaacacagggacaggacaaggagagaagaggcggagcgcccaggcgccaaaccgagccaacggacccccaccgggc

SEQ ID NO: 248812 - RNA, 63 nt, Homo sapiens
agcgggggccccgcagaaggggggaccggcgggagacccaagaagccaccgccccaccgcccg

SEQ ID NO: 248813 - RNA, 58 nt, Homo sapiens
gccacgcgaaaacccaagagcacgagagcaccgccgggcacacaagaaggggcagaga

SEQ ID NO: 248814 - RNA, 82 nt, Homo sapiens
ccaagagcggaacgccagccccggcacgcacccgacccaaagcagggacggcagcggagagaacggccaaggccggccagca

SEQ ID NO: 248815 - RNA, 103 nt, Homo sapiens
caacacccgacaaggccaaagcaagcggagcagcaagggagacgcgaccaaacacaccaagcggcgggacagacgggaggggggcgccccgacgagcggcgcg

SEQ ID NO: 248816 - RNA, 70 nt, Homo sapiens
cacagcacagccgggaaggggagccaccagcccccgggccgggggcaagacggagagaacggcccaggaa

SEQ ID NO: 248817 - RNA, 71 nt, Homo sapiens
agacagcaggagccacgcaggcgcaaaaaccagacaccccacaccaccacccagacgaccaaaagggcacc

SEQ ID NO: 248818 - RNA, 67 nt, Homo sapiens
aaaagaccaagaccccagagcggaccaaaccgacaaggagcgacaaacaaggccgcaaaggaacgcc

SEQ ID NO: 248819 - RNA, 85 nt, Homo sapiens
cggcgggcaggcacggcagggcagaaggcccaggagaaacgcgaggccgccagccagacggcgggccggaccaggcggcccgaaa

SEQ ID NO: 248820 - RNA, 65 nt, Homo sapiens
gaaggaccaagaaccaggacgccgccagccaccggcgcgaagccagaccagaccagcaggggcac

SEQ ID NO: 248821 - RNA, 67 nt, Homo sapiens
ccgcaacaagaccccgaaaaagagacgggccagcgagacagaccgaaacccaaagaaaaggagcgcg

SEQ ID NO: 248822 - RNA, 74 nt, Homo sapiens
gacccgcgaaagcggggcacaggcgggcacgcgcccagccaccagcgcaagggcaaccgggggccagaaccgcc

SEQ ID NO: 248823 - RNA, 76 nt, Homo sapiens
gagacaggacacagaacagaagcgaagaagggacgaaaggcagagcaccaggccaagaaccccaaaaacagcagca

SEQ ID NO: 248824 - RNA, 76 nt, Homo sapiens
cgccccccggcgaggacgacgcgcaacgcgcaccaacccagggagccgcgaggccgacgcccgccccgaaggaggc

SEQ ID NO: 248825 - RNA, 52 nt, Homo sapiens
cgcacccccggccggaggcaccagcggaagcagagccccgggccgggaaggg

SEQ ID NO: 248826 - RNA, 40 nt, Homo sapiens
acgaaggaaaacaaggaggcccagcgaagagaaagaaaac

SEQ ID NO: 248827 - RNA, 72 nt, Homo sapiens
ccaggggcgcgcgccgcgcggccccacggaaaaaagcccagaaaaaagaaagagagcaagaaggaaggcagg

SEQ ID NO: 248828 - RNA, 71 nt, Homo sapiens
gccgccgcgcagccgcgcccggacagggaggcacaaggacgcaaaacagaacccccccaggacagcaagaa

SEQ ID NO: 248829 - RNA, 76 nt, Homo sapiens
ccggcccgcccggacagagcccgggcgcgcaggacaagacaggaggacacccgaaacaagggggcgcgacacagga

SEQ ID NO: 248830 - RNA, 76 nt, Homo sapiens
cgagacgcagaccacagcgacgaggacgacgccgacaaggcacgaggcgcggcgaccaccacagcagagcccggcg

SEQ ID NO: 248831 - RNA, 75 nt, Homo sapiens
cgggagcacagccgccgagccaaggaaaaggaacagagagagcagaaccgaaacggggaaagaccgaagaaagaa

SEQ ID NO: 248832 - RNA, 73 nt, Homo sapiens
cgggccaggaaagaagaaaggggcaagaacaggcggccagaagaaccaacccacacaaccagggggaagaggg

SEQ ID NO: 248833 - RNA, 80 nt, Homo sapiens
gagaagaagggccgcgaggaaaagagcccaaggcagcagcaccaggaaggaacgggacagcggagcagaggaccgaggac

SEQ ID NO: 248834 - RNA, 73 nt, Homo sapiens
accagacaaaaccgacgaaggaacgggaaaaaggcgggagcggaaaggacgaagaaaggagggcaggggaagg

SEQ ID NO: 248835 - RNA, 59 nt, Homo sapiens
cgcgagcaccggaaacagggcccacacaggaacaggcaagggccaaaaagcaaaggacc

SEQ ID NO: 248836 - RNA, 73 nt, Homo sapiens
gcaagaagcaccgcacgggcccggccccccgaggaggagcgcaagcgccgcggagggcccgcccaggagcggg

SEQ ID NO: 248837 - RNA, 67 nt, Homo sapiens
ggcaacagccggagacaggagcaccagacagcaaacgaggacaacccagagacaaagccaaacaggg

SEQ ID NO: 248838 - RNA, 80 nt, Homo sapiens
cgaacaacagaaggggaagaggagaaaaagccagaggcaaagaagcggccgacacgaacggacaacaagcagggcacacc

SEQ ID NO: 248839 - RNA, 41 nt, Homo sapiens
gcacgcggaagcgccaggacgagagaggagcgcgggccgag

SEQ ID NO: 248840 - RNA, 73 nt, Homo sapiens
ggcgacgccgagcacgccggacaaggagaggaggcagaaaacagaccgcaaaagccagggcccacacggaaac

SEQ ID NO: 248841 - RNA, 41 nt, Homo sapiens
gacaagaccgagaagaaggaacaggccgagagcagccagaa

SEQ ID NO: 248842 - RNA, 76 nt, Homo sapiens
caggaaaaacagaagaggcagggcaaaacgaggagggggaggggccaggaagacaaaaacagagagaacagccaaa

SEQ ID NO: 248843 - RNA, 69 nt, Homo sapiens
gggccgcgccgggacggcccaccagccaccccaccgcgcagggagaccggacaacgcaacagaggccag

SEQ ID NO: 248844 - RNA, 84 nt, Homo sapiens
acgggagacaagaagacgccaacgagcggcgcggacggcgcgcggacaccaggacagacaagcagacggggccgccacacgccc

SEQ ID NO: 248845 - RNA, 73 nt, Homo sapiens
cggaggcggggggaccggcgggcgggcagaagcccccggggagagacagacagagggacacagagaggaagaa

SEQ ID NO: 248846 - RNA, 39 nt, Homo sapiens
agaagagaacaaagaacgcacaagccagagacgcgcacg

SEQ ID NO: 248847 - RNA, 74 nt, Homo sapiens
gcagcggggggcgccccgcgccaccgcggcccgcgcaggagaccgagagcacagaccagccaagaaaacgaaaa

SEQ ID NO: 248848 - RNA, 60 nt, Homo sapiens
gcaacggagaaaacccggaaccgcgacggcggcaggccggcaagaagccaacggagaacc

SEQ ID NO: 248849 - RNA, 75 nt, Homo sapiens
aggcccgcgagggcgaggccgggagagggccccggcacaaagcagaccgccccacgggcgcgcccgcgacagcac

SEQ ID NO: 248850 - RNA, 72 nt, Homo sapiens
cgaacccaccgagccagggagaagggagcacccccaaggacaccacgagaccaaacccgggggcagcagccg

SEQ ID NO: 248851 - RNA, 74 nt, Homo sapiens
ggagcggaagaggccacgaggcgcacaccgccagcccaagaaaaagggacggaaaaggcgcacacgacccggag

SEQ ID NO: 248852 - RNA, 78 nt, Homo sapiens
cacgcccggggcgcgacgggccgccgagacacaagcaaaagcagaccggaaaacccaccggcaagaccacacccgagg

SEQ ID NO: 248853 - RNA, 63 nt, Homo sapiens
agcagcaacgcaagacaccggcacgcaacagaccgaaacaaggaccccccgggagaagaaaag

SEQ ID NO: 248854 - RNA, 83 nt, Homo sapiens
aaacccccagagcgaggacggggccgcccggcggccgaggcgcccgccgaaggcccgcgaaaagagcccgcaggaagcacacc

SEQ ID NO: 248855 - RNA, 80 nt, Homo sapiens
ccgcagaccgcagaaggccggagacaccagcaggcggagccaggccgcgaaaaccacaacgcaccagagggcaagagccc

SEQ ID NO: 248856 - RNA, 62 nt, Homo sapiens
cccacagaaacccggacgagaggcagcgagaggggggacagcaagcaggcccggaaagaaaa

SEQ ID NO: 248857 - RNA, 62 nt, Homo sapiens
cgagggaaggcgccgcgccaggccgggcgggcgggcagaaacaaaaagaagcacgggaaaaa

SEQ ID NO: 248858 - RNA, 74 nt, Homo sapiens
accggaacagacgcaggaaggcaagccggagaccagaagaaaccccagagccggaagacacggacgagccggcc

SEQ ID NO: 248859 - RNA, 92 nt, Homo sapiens
ccaccgccccaggacagcaccagcgggccggaggagccagagcgcagaaagaagagaccgacccaaacccacccaagggcaggacgggaagc

SEQ ID NO: 248860 - RNA, 81 nt, Homo sapiens
acgagaccaagagaaggcagccgagcaccgagccagcccaggaaaaggagaggaagaagacggcacgggacccccagcaca

SEQ ID NO: 248861 - RNA, 72 nt, Homo sapiens
ggggcgcgaggcgcgaggcgcagggaaaaaacagcgggccacacaaagccgggagcccacaggacgcgggac

SEQ ID NO: 248862 - RNA, 37 nt, Homo sapiens
gaacacagcaacacccacggaacgaagaggggcacaa

SEQ ID NO: 248863 - RNA, 68 nt, Homo sapiens
gaaaccgggagaagaagggcacgacggacagaagccacagacgggagcggcaggggaggcgaagaaga

SEQ ID NO: 248864 - RNA, 50 nt, Homo sapiens
ggccagacgacaacaaagcagccaggaagaaagggacccggagggcggag

SEQ ID NO: 248865 - RNA, 65 nt, Homo sapiens
gaaccaggcgccccaggagaaggaccgaaggcccagagcggagacgccaccaccccccagaggga

SEQ ID NO: 248866 - RNA, 77 nt, Homo sapiens
acgggggcggccgggacggaggacgcgcagggcggagaacggaaaagcaccaggaagcagagaggaccgcagaaggg

SEQ ID NO: 248867 - RNA, 53 nt, Homo sapiens
gacaaaagggccaaagaagggagagaggccgcaagggcgggggaaacaagcag

SEQ ID NO: 248868 - RNA, 66 nt, Homo sapiens
aaaacggaagcacgaaccaaccgaaaacagaaacaaacacaccaggcccagagcgccaagaggcaa

SEQ ID NO: 248869 - RNA, 67 nt, Homo sapiens
gcagcaaagaagagaaaaccagaacgaggccagcagccagacaacaccaacagcgccgaggacacca

SEQ ID NO: 248870 - RNA, 72 nt, Homo sapiens
acaggaggagcagaggacacgaaaagaagcaagaaggcaaagacggagggagaagccccagccagccacacc

SEQ ID NO: 248871 - RNA, 71 nt, Homo sapiens
ggcaggagcacgcgaaaaaccagaccaaacgaaacgcccgcacagcacccacaaaagcgaaaagccagaca

SEQ ID NO: 248872 - RNA, 76 nt, Homo sapiens
gaaagaggaagaccaaagggcacacaaggaggaacaaaacgggggaaagacacccgcaccagcgccaaccggagcg

SEQ ID NO: 248873 - RNA, 73 nt, Homo sapiens
ggacaagaaaagcgggcaaccgaaagagacccccagaccaggaaagacagaggcgcggccagcgaagaagacg

SEQ ID NO: 248874 - RNA, 104 nt, Homo sapiens
caaggggacggagagaccaacacaaggagaacccagagaagaagaggcccggggaggcaagcaggggggcaaaggaaagaaggcagaaagggaggccaggagcg

SEQ ID NO: 248875 - RNA, 37 nt, Homo sapiens
ggacagacaccacaacgcgacagagagaagggggagg

SEQ ID NO: 248876 - RNA, 68 nt, Homo sapiens
ggaggagaacccacacacaagaacacaggaaccaaacccacgaagaccgcaggaaagcaggaaggcaa

SEQ ID NO: 248877 - RNA, 80 nt, Homo sapiens
ggacccaggggagcgcccccgaaggcaggacagcggggcggcagaccacagagaagcccacccggaaacaaacgccaggg

SEQ ID NO: 248878 - RNA, 78 nt, Homo sapiens
gccagagaaagccacccaccccgcaaagaaacaagaggcacccagcaagcccaggaaggacagcaaaaggagaaccag

SEQ ID NO: 248879 - RNA, 66 nt, Homo sapiens
agaggacgaaaaaagaacgggcagaacaggaaacagaaagaacacacaggaacaaaagaaaaagca

SEQ ID NO: 248880 - RNA, 87 nt, Homo sapiens
acagcacacgggcaagcggcagcaccaccaacaccgcagccgcagcggacggcaggcccgagggcgaggagcacagaccagcgcgcg

SEQ ID NO: 248881 - RNA, 84 nt, Homo sapiens
cagacggcgcccagcaacacagaagccgacaaggcgcaagcgaaaacagaccgcgagcccagagaaaaggcacacacacccgca

SEQ ID NO: 248882 - RNA, 80 nt, Homo sapiens
gcccaagccgcacagccgcggcggcagcagcaggagaggccgacgcccgccgcggccggggaacaggccacagccaggag

SEQ ID NO: 248883 - RNA, 69 nt, Homo sapiens
caagccgggagcccaccacacaggagcagacaggaccaacgaaggaagccgaacaggacagacgggagg

SEQ ID NO: 248884 - RNA, 76 nt, Homo sapiens
ccggaagaggagaaaggacacacgaaaacagacgggggaacaagagagacagaaggaggaagcggaaggcgccgga

SEQ ID NO: 248885 - RNA, 74 nt, Homo sapiens
agggggccccacaaacagcacaagggcaacacaacagcacaaacacaaccaggccaaggaagcacgggaagaac

SEQ ID NO: 248886 - RNA, 108 nt, Homo sapiens
agaacaaacgagaaggcagagaggggaagaccaagagcacaggcaggcagcggaagagaaagaccgaggcaaagaagcaggagcacacaaagaacagcggcagacgga

SEQ ID NO: 248887 - RNA, 80 nt, Homo sapiens
gaacccgcggccaccacccaagggccacggccgccccggcggccggcaagcgaaggaccgcagggagccccccggagcca

SEQ ID NO: 248888 - RNA, 80 nt, Homo sapiens
ccagcccgggcgggccgcgcgggagagacggcccgccacgggccccgcagccgcgcccgagcgcccgagcagggacagcg

SEQ ID NO: 248889 - RNA, 73 nt, Homo sapiens
acaagaccaagcgagcaggaaaagagccaaagcacaggagggaagacagcaagagacgagacaagcaacgagg

SEQ ID NO: 248890 - RNA, 75 nt, Homo sapiens
caagagaacacaggaagccggcggcaggacacccgccggcgccgagagaaagagagcagaccggaggaacaccga

SEQ ID NO: 248891 - RNA, 106 nt, Homo sapiens
cccaaagacaggccagacacgagcagaggccacgcgggaggggggcaaaggccacgcgcagagcgaacaccaccgcgaagacgcagccacccgcgcccaccgagac

SEQ ID NO: 248892 - RNA, 85 nt, Homo sapiens
acggcgcaggcccgccagacaagggaccggcaccacgccggcagagccgggccaaccgccccagcggggaaagacggacacacca

SEQ ID NO: 248893 - RNA, 58 nt, Homo sapiens
cccggccggacaaccgcgcgacccagccggacacagacagccacggcgcaggagcggc

SEQ ID NO: 248894 - RNA, 79 nt, Homo sapiens
aaagacggcggaccgcgggggagaacggcggcaaaaccccgaccgggggcggcccacggaacggggaaggagcgagagc

SEQ ID NO: 248895 - RNA, 39 nt, Homo sapiens
cccccgccgccccgggggccggacggacgccgccagcca

SEQ ID NO: 248896 - RNA, 71 nt, Homo sapiens
cagcggcccggcggaaccgggaaggggagccaggccgcccggcggaggcccacgcggaccggcagcgccac

SEQ ID NO: 248897 - RNA, 76 nt, Homo sapiens
gagacaggcaggacacggaccgcaccaggagacccagcccgaggaacagcagagggaagaaagagccaaacaggcg

SEQ ID NO: 248898 - RNA, 86 nt, Homo sapiens
gccgcgaagcacacgccgccccgacgcgagggcagccccgccaggagagcgacaagcagcaggcgaacaccaccggagcccccaag

SEQ ID NO: 248899 - RNA, 60 nt, Homo sapiens
gcccacgaggaggagccggaccgcgccaagagggggcaagcggcccaggccaaggggggc

SEQ ID NO: 248900 - RNA, 68 nt, Homo sapiens
ggagcacagcagccgggccggcgaaaaaccgagcacacagagaaaaacacccagcagcgggaaaacag

SEQ ID NO: 248901 - RNA, 109 nt, Homo sapiens
caacgacagcccaaaggggcggagagccaccccggcaaagcgcccagcagccacggaaaagaggcgaggaagacaacaaaggccaggccgaggagaaggaccaccccga

SEQ ID NO: 248902 - RNA, 72 nt, Homo sapiens
ggggaccgaccgcaacagaacggacccgcccgccgacacagccaccaagaaggcacaagcagaacgggaaaa

SEQ ID NO: 248903 - RNA, 72 nt, Homo sapiens
caaggaagcgacagccaggaccaggcacccgggaagacgcggcgaggaagagggcagacgcccacgcaaagg

SEQ ID NO: 248904 - RNA, 69 nt, Homo sapiens
cgggggcccagggccccgggccgccgggaggcggcagcagaaggacgaacgacaccgggccccccccgg

SEQ ID NO: 248905 - RNA, 79 nt, Homo sapiens
gacccgcgggcccaagcacaccggagcaacaaccggcgggccgaggccgcaggaggagggagggcacgcggaccaccca

SEQ ID NO: 248906 - RNA, 64 nt, Homo sapiens
ggcaaggaaacccaaccccaggcacggaaagcaggggaagacaaccggacccagaaccagacac

SEQ ID NO: 248907 - RNA, 80 nt, Homo sapiens
cagccccgagagcgggacacagaaaaaggccgaccccgcccggaagagcacagaccccagcagggggcgaagacgacggg

SEQ ID NO: 248908 - RNA, 78 nt, Homo sapiens
gagagaccacaaggccggccgacaaaccaccaggcaggcaaccagcgggaccagaggagaccggagccaccaaaaacg

SEQ ID NO: 248909 - RNA, 43 nt, Homo sapiens
acgcagacaccagccgcgccaggccggcgcggaagaggccggc

SEQ ID NO: 248910 - RNA, 72 nt, Homo sapiens
ggaacccagagaggcccagaaaaaccagcaagggcaacccagccaggggagcagcaacacacaggcccgcag

SEQ ID NO: 248911 - RNA, 61 nt, Homo sapiens
ggacagcgccagcaggaagacaagcgcacacgcacggggaaaaggccaggagcagcgagag

SEQ ID NO: 248912 - RNA, 84 nt, Homo sapiens
aacagcagaccaggcagcagccgcagcaggcaggaagagagaagggcacagaccaagacaacgaaccccggccaggacaggccc

SEQ ID NO: 248913 - RNA, 81 nt, Homo sapiens
cgagaagaacgcagacgacccggccaagccgaggccaaaaccggcggaacaggagccacgccggagccaaaaaccgaacac

SEQ ID NO: 248914 - RNA, 95 nt, Homo sapiens
aaacaaggcacccagagcaccacagaggcgaaacacaaaagaagacgggggacaggagaggaagagacccagacgaagagcgcacagaaagaggg

SEQ ID NO: 248915 - RNA, 85 nt, Homo sapiens
caacgggcaaaccccgcccagcagggccagaagcccccaggaggagaacgagcaacggaagccagaagaagcacccccagcaggc

SEQ ID NO: 248916 - RNA, 72 nt, Homo sapiens
acagccccaccccgaaacgccccgaaaagacgggcaacagccaacagccacacaccaggcaagacacaagcc

SEQ ID NO: 248917 - RNA, 88 nt, Homo sapiens
gggcaagggcggagaaacaagaacaggggccaagacaagcagcagagaggagcagcggggcagggcaggggggagcgggcccagcagg

SEQ ID NO: 248918 - RNA, 76 nt, Homo sapiens
gaggacccgaaagccgcgcacaaggaggcaagcggcaccacgacaaccccacaccaacgagaggcaacgcgaggag

SEQ ID NO: 248919 - RNA, 71 nt, Homo sapiens
gcacgaaagccccacccgccgcagcaagcagaggggcccacggcccagggccggagaaaggcccgggaggg

SEQ ID NO: 248920 - RNA, 79 nt, Homo sapiens
gcggacccagggcccggcgaaggacccggccgaggcgggcgcaagagaaggcaccaagagaacggccccaaaaaaaagg

SEQ ID NO: 248921 - RNA, 79 nt, Homo sapiens
ggacgcagagcaggcggccgggcgcccggagaacaggaagcccggccaggcccacccacgggaccagggccacaaagga

SEQ ID NO: 248922 - RNA, 77 nt, Homo sapiens
cgcccgcaagaccggagccagcgaggccacacccgaaagcaagcccagaagggaagaaccccagcacaagaagaaaa

SEQ ID NO: 248923 - RNA, 54 nt, Homo sapiens
caaagccagcgacagaagccaggacgggccacgaggcaccggccgcgagcacca

SEQ ID NO: 248924 - RNA, 74 nt, Homo sapiens
agaaggagcggcggacacacagacccccaccaagcagaccagggggaggaagcgggcccgcacacaccaaaacc

SEQ ID NO: 248925 - RNA, 77 nt, Homo sapiens
gaagcggccaaagccgcccagacggccaccggcgggaggaacaaaaggaggaggcggcaggagaagcagagaagacc

SEQ ID NO: 248926 - RNA, 66 nt, Homo sapiens
agccacccaagacacagcaaggaaacggccaagaagcggaaagagaccagagcagcacccgacagg

SEQ ID NO: 248927 - RNA, 57 nt, Homo sapiens
caccaccgcccaaccccaggcaaccccgcacaaacccagcgaacaacggaggaggac

SEQ ID NO: 248928 - RNA, 73 nt, Homo sapiens
gcacagcgcgccaagcgaacggagagccagccgggagagcaccaagaagcagacaaaccgcgacgaaaacaag

SEQ ID NO: 248929 - RNA, 72 nt, Homo sapiens
gcgagcgagggggggcgcgccggaaaccggagcgcgcagcagggacccaccaggagagggggccaagaggag

SEQ ID NO: 248930 - RNA, 62 nt, Homo sapiens
aagcggcgcgagcggcgagaccggaccgcacaagcagcagcagcggcaccaagcgcggggac

SEQ ID NO: 248931 - RNA, 77 nt, Homo sapiens
aacggagaacgcggcaaaggaccaagcaaagaccccgagaagagaaaacgccggcacagagcaagaaagaaagccaa

SEQ ID NO: 248932 - RNA, 76 nt, Homo sapiens
gggaagccccgcggagccgccaccacgacaacagagaacgaggaagaaaaggaaacccaaaaagacaaggccaagc

SEQ ID NO: 248933 - RNA, 83 nt, Homo sapiens
gagcggagagccaggcgagagaggcccgggccccggaccagaagcgcgccaggacaccgccagaagccgaccacaccgcaggg

SEQ ID NO: 248934 - RNA, 81 nt, Homo sapiens
ccagcccgccgaagccgcgccagaacgaccccgagaggcgcccgccccgagagcaagcaaaagagccaacacccaggccag

SEQ ID NO: 248935 - RNA, 61 nt, Homo sapiens
cccaggccggccagcacccaccgagaaggccagcagaacacgcggaaaaacccaacagcca

SEQ ID NO: 248936 - RNA, 83 nt, Homo sapiens
cggaggaccagggacccacagaacagaccagacacccaccggaacacaaccacgcccggcgagaaggcaaaacagggccgaaa

SEQ ID NO: 248937 - RNA, 52 nt, Homo sapiens
ggagaagacgaaagaagggaccacgaacgaaggggcggcagaccgcaaggac

SEQ ID NO: 248938 - RNA, 73 nt, Homo sapiens
gcgcgcgaccgcgccccggaggggaccaggaaaaggccgaagaccccagcaaccagcggaggggccggcacgg

SEQ ID NO: 248939 - RNA, 69 nt, Homo sapiens
gaacgaaccccaccaacacaaggcccagccaggcaggagggagggaacgcaaagaccggaaaggaagac

SEQ ID NO: 248940 - RNA, 66 nt, Homo sapiens
aaaccaaccaacggaaaacggcaggacagaaacggaggaacgcgagagaagagaagggaaccgcgg

SEQ ID NO: 248941 - RNA, 67 nt, Homo sapiens
caccagccaccgcagaggacagacagaccagaggacaagacaaagggagcaagacaagccaaagagg

SEQ ID NO: 248942 - RNA, 75 nt, Homo sapiens
cccaacgggccccagcgccaaccaaaccgaaagccagaagggggagaggcaccagcaacagaccaaccgcagcaa

SEQ ID NO: 248943 - RNA, 71 nt, Homo sapiens
ggcaaaagaaagaccaagccgaaagagaaaaagacgggcgcgcagggcgggacaccgcgaccacaacaacc

SEQ ID NO: 248944 - RNA, 112 nt, Homo sapiens
ccggagcgccccggcccggacggagccggcggcgcggccggcagccggcagcgcagcgggaagagagaaggccacgcccgaccccaagcaacaacggggcagggacaggcgc

SEQ ID NO: 248945 - RNA, 54 nt, Homo sapiens
aggcgacaaagagaaggaaagcagaagccaccgggaaggccccgcgagaccggc

SEQ ID NO: 248946 - RNA, 42 nt, Homo sapiens
aggacagaacaccagcacggcgaagcgaccaaccccggagcc

SEQ ID NO: 248947 - RNA, 86 nt, Homo sapiens
cgccgagcccccggcgcccgcgccgccgcgcgcgggggcccccgccggccgccgccgcccgagggggggccccagcccggccgaac

SEQ ID NO: 248948 - RNA, 76 nt, Homo sapiens
cagaacccccagggccgaaagccaccgacccaaaacaaccaaggaaacacaaagaagacaccagaagggccagcac

SEQ ID NO: 248949 - RNA, 52 nt, Homo sapiens
cgccggggaaaacacaggcagccagacaggccaggacagcggaggccaccac

SEQ ID NO: 248950 - RNA, 39 nt, Homo sapiens
gccccccagaagaccaggccccgggaccaaggacacgca

SEQ ID NO: 248951 - RNA, 73 nt, Homo sapiens
aagcaccgcacaacccccggaaaccgggcagcgaaagaaaaggaaagcggcagaaggaaaggagaaggaaagg

SEQ ID NO: 248952 - RNA, 85 nt, Homo sapiens
cccggcggcgccgcgaccccggagacccgggccggcccccaccagagaccggccagaagcggacccagaagaggggagcagcaag

SEQ ID NO: 248953 - RNA, 72 nt, Homo sapiens
agggcgaagcacgccaccagccacggaaagcagagcaagcagagacccagagaacccaaacaagaccaaaac

SEQ ID NO: 248954 - RNA, 83 nt, Homo sapiens
accgcccccaccgggaccgaccgcaaacaaggagagccacgagcagccgaggggcggagggaccacagaacccaccgaaggac

SEQ ID NO: 248955 - RNA, 81 nt, Homo sapiens
acccccgccagcagccgccggagccagccaacgagcgaagaggccccaggaccggcgaggccccccccccagcagcaaagg

SEQ ID NO: 248956 - RNA, 93 nt, Homo sapiens
acagcaaggaggcggcaaaaaaaaagcgcacacacgacgagcccgagcgaagagaggaaggacaggacaagccaaggcgccagagcccgaaga

SEQ ID NO: 248957 - RNA, 76 nt, Homo sapiens
gaaagcgagcagagcccgcgaacaagacaagacacgagaggcgagggacgacagagcaagcggcagagggcaagcg

SEQ ID NO: 248958 - RNA, 77 nt, Homo sapiens
agagccacccaggacgcagggaagaggaaagaggaaagaggaagacgcaaggggcagagaagacacagccgaaagag

SEQ ID NO: 248959 - RNA, 44 nt, Homo sapiens
ggcggaggcgaaagcggaacgagggcggcgacggcggcgcgagg

SEQ ID NO: 248960 - RNA, 63 nt, Homo sapiens
acgaaagccggccacgccgggccggagccgggacccaaggccagccagccccaggcaccagcg

SEQ ID NO: 248961 - RNA, 53 nt, Homo sapiens
cggccggccacgcgcacccaacaagcaccgcaaccgcagcccaagaccccaac

SEQ ID NO: 248962 - RNA, 81 nt, Homo sapiens
caaggcggagcacgacgaagacacgcacacacaggggaaccaacgccaagaggcccagaagaaccaacaacagcggacccc

SEQ ID NO: 248963 - RNA, 73 nt, Homo sapiens
gacaaaagcaacgaccgagagacgggcccccccacacgcaaaccaaaagaaacagccaacaaaaaaccacgag

SEQ ID NO: 248964 - RNA, 73 nt, Homo sapiens
cgggacgacgacggaaaggcgccacaagggacaccaagcccacccaaggacgagagaaacgacaccaagaacg

SEQ ID NO: 248965 - RNA, 79 nt, Homo sapiens
agaaacaagagaggaacggagcaagaagcgacacaaggagaaaagacaaccgagagagacgccgcgcgcaccccacaca

SEQ ID NO: 248966 - RNA, 72 nt, Homo sapiens
gcgggcgcggcacccggcaaaggaagacagaaaacacagagaaaacacggagaaacagcaacaggagaaaag

SEQ ID NO: 248967 - RNA, 55 nt, Homo sapiens
accaggaggaagacggcgaaggcccaggccacaccaccacaggaggcaagaaccg

SEQ ID NO: 248968 - RNA, 78 nt, Homo sapiens
ccccaaagcccgaagaaccaccaaacccagaccaaaaacgccagaacacgacgagcagggccccgagaaaggcagagc

SEQ ID NO: 248969 - RNA, 83 nt, Homo sapiens
cagcagccagccggcccgaggacaccgacaccagcaggccagaccaagaagccaggcgggcaggaacagccagcaccaacagg

SEQ ID NO: 248970 - RNA, 57 nt, Homo sapiens
cgaaacgcacgagaaggcccaccacacacgcagggcgcagcaaagaagagggaccac

SEQ ID NO: 248971 - RNA, 67 nt, Homo sapiens
gcccagcccccgaagcgggacacaggagacaccgggggaggagccacaggaaccgcaaaggagccca

SEQ ID NO: 248972 - RNA, 58 nt, Homo sapiens
gaaagccggcaggggggggggaaacaccccaagaagagggaacaacgagaaacaaaac

SEQ ID NO: 248973 - RNA, 66 nt, Homo sapiens
gcggagcggagccggccgacgcgggcgcgagggcagaaccgggccgggcgggacagagggaaggga

SEQ ID NO: 248974 - RNA, 65 nt, Homo sapiens
ccggaaccggaggagaagcccagggagcgcaccccaggaaaccaggaaccgagcccgcaagagac

SEQ ID NO: 248975 - RNA, 74 nt, Homo sapiens
ggccgccagaggagcacaaaagcgggagagggaaagcggagaggggaagagcacacaccagagcggcgcgggga

SEQ ID NO: 248976 - RNA, 86 nt, Homo sapiens
cgcaccaggcggagccccagccggggcccagcgaacgccaggggcaccaccacgaggcgaggggccaaccaaggaggcgaggggcc

SEQ ID NO: 248977 - RNA, 71 nt, Homo sapiens
ggccgccccgcccccaccgccgcagacccccaagcagcagccagggcccggagccacgcagccgccggccc

SEQ ID NO: 248978 - RNA, 67 nt, Homo sapiens
cgagaggccggacgaggcacacagagaaaaaaagggaacaaaacacagcaagcagacaaaagggggg

SEQ ID NO: 248979 - RNA, 81 nt, Homo sapiens
cagcgcaaagaaagaagaaaaggaacaaaaggaggaaaaaaacaggcaagcagaagaggaacagaagaagcagagcagaga

SEQ ID NO: 248980 - RNA, 74 nt, Homo sapiens
gaggaggaacaccaggcacaagcaacaaggaggaggaccaaagccacaaagaggggaaccgccggcacaaagga

SEQ ID NO: 248981 - RNA, 75 nt, Homo sapiens
ccgagagaacgagcacccccgaagcacccaggacaagccacacaagaaggagaaaaaaaagagaaggcaccccac

SEQ ID NO: 248982 - RNA, 40 nt, Homo sapiens
aggaagaacggaccagaaacagacaccaacccacgagcgc

SEQ ID NO: 248983 - RNA, 75 nt, Homo sapiens
aagaaagaggcacaaagaagaacgggagcgccgcaaggagccaaggaccaagagaacgaaccagacacacaaagg

SEQ ID NO: 248984 - RNA, 54 nt, Homo sapiens
cagcaaaaggaccccgagggaaccacccgccccgaccaggagaggacagacagc

SEQ ID NO: 248985 - RNA, 44 nt, Homo sapiens
aaggaccaagaaccagaacaaggaaacacgcagaaggaaaagcg

SEQ ID NO: 248986 - RNA, 58 nt, Homo sapiens
gacaagagaggaggccacccgaccgccaccagaggcacaggcggccggggccgggccg

SEQ ID NO: 248987 - RNA, 64 nt, Homo sapiens
ggaaccaggacagcgacagcggcaacgagaaacggcccagcaggcaagaaccacagaacaacgg

SEQ ID NO: 248988 - RNA, 74 nt, Homo sapiens
aaccccacgagaccgcacccagaaggcagaaacggaaacagagagcgcaaggagcagccgaacaagcgcacgga

SEQ ID NO: 248989 - RNA, 67 nt, Homo sapiens
aggacagaggcaagaggaaggagaggggccaaaggcaagcagaagaggaacagaagaagcagagcag

SEQ ID NO: 248990 - RNA, 73 nt, Homo sapiens
ggagaaaaggccaagaaggcagccccagcaacggagcgaaggaacacaaaaagaacgaaaaggaaggaaccag

SEQ ID NO: 248991 - RNA, 80 nt, Homo sapiens
ccgccacgaaggggagccccggagaaccgagacaccaagaacaccaggagaccaagacggaaggacgagcggaacacggg

SEQ ID NO: 248992 - RNA, 64 nt, Homo sapiens
ccgggccccccagcagacgcgggacaagagaaaaaaagggcgggcgaacaaaaagagcagagga

SEQ ID NO: 248993 - RNA, 69 nt, Homo sapiens
cgcccgcaggggaaagaacgagagccaggccgcagagcagcgcgaacacagcccaggcaaagagcagcc

SEQ ID NO: 248994 - RNA, 66 nt, Homo sapiens
caaaggaggaaacggaaggaggagaacacagagccagagaaaaaaaacacagaaaggcccaagaaa

SEQ ID NO: 248995 - RNA, 81 nt, Homo sapiens
acagggaagggcgcgagcggggacaaagcggccagggcgccgccaagaagaggggacccggagaagccacagcaggcagag

SEQ ID NO: 248996 - RNA, 65 nt, Homo sapiens
gggaacgaccccacaggaaaacgagggcaacgcaagcccaaaaggcagagcgaggagagaagaag

SEQ ID NO: 248997 - RNA, 79 nt, Homo sapiens
ggggagggaggcggaggggagcggagcccggagcgcgggaaagcgccccagcaaaccaccccaaccgagccagaggacg

SEQ ID NO: 248998 - RNA, 74 nt, Homo sapiens
gcgaaaaagacccggggcagagccagaaggagagccaagcgccagagaacaggaggaggcaggcgcgggaagcc

SEQ ID NO: 248999 - RNA, 66 nt, Homo sapiens
gacaacccagaaaaacacgccaacacaggaaaggggccaggaccagagacaagggcagagccaagc

SEQ ID NO: 249000 - RNA, 54 nt, Homo sapiens
agagagaaggcagggcaaaccagaaagacgcagagagagacacagccgaaagcg

SEQ ID NO: 249001 - RNA, 76 nt, Homo sapiens
ccaccaggagcaccgaagcacaaacaagcacgaaaagggaacgcacaaaaagcggggaaagcagaaagaaaggacg

SEQ ID NO: 249002 - RNA, 86 nt, Homo sapiens
gggcagcggagcggcgagcgcgaaggcacgagcggagggagaacaagaacgcagccaaacaaccaaggaaaagaagaaaaggaagc

SEQ ID NO: 249003 - RNA, 62 nt, Homo sapiens
gcagggcggcgcgaggaggcggcggaggacacggccggcggcaggaccaaccccggaaagac

SEQ ID NO: 249004 - RNA, 80 nt, Homo sapiens
gcgcgcagcacgcgcggaggccggcccgccgggcgccgcagaccccaccaggcggccagcaacagcgccaggccccaccg

SEQ ID NO: 249005 - RNA, 37 nt, Homo sapiens
acggacaaaggaacaggaccagcgcgcgggaggcggg

SEQ ID NO: 249006 - RNA, 70 nt, Homo sapiens
cccggagcggccccgacagcccggaccgacaggaaagaaggagcccacaaagaaaagaacaccgccagca

SEQ ID NO: 249007 - RNA, 68 nt, Homo sapiens
ggaccgcggagggaacaccaccgcaacccaccaaggagcacaggacgaagaggaaggaaaaaacaggc

SEQ ID NO: 249008 - RNA, 81 nt, Homo sapiens
ggcagacgaagaagaagcaagcgaggcccacaagaagaccaagacgagcaaaccagcaagccaggaagcaccccccccgca

SEQ ID NO: 249009 - RNA, 62 nt, Homo sapiens
ggaaacagcccgcaaaggaagcaaacccaaggggaaaggagcagagcgaggacacagcccag

SEQ ID NO: 249010 - RNA, 74 nt, Homo sapiens
ggagaccagccccaagccacggaccagagacacgccaagcagccagcccaggagagaacaacagcgaccccaag

SEQ ID NO: 249011 - RNA, 76 nt, Homo sapiens
ggaaggccaaaagacacagggaaccaccaggagacacgaaacgaacgcccgacagagaaaggcacaacccagacca

SEQ ID NO: 249012 - RNA, 80 nt, Homo sapiens
agggcaggccggccaggcaggcacgagaaggggaggagccgccaggcagaacacgcagaccggcaccggagaaagaaaag

SEQ ID NO: 249013 - RNA, 71 nt, Homo sapiens
gacgaagagcgaagcggagggggccccaccaaaaccccgaaaggacacggggggcacacaacccagccagc

SEQ ID NO: 249014 - RNA, 76 nt, Homo sapiens
cgccacaggggcaccccgcccacggacaggggaggcacaccggggaaggaggaagccacacagacgagggaagcag

SEQ ID NO: 249015 - RNA, 75 nt, Homo sapiens
gagcacacaaaaaaaccaaagaggagccagaccagaccaccagagaacacaggaagaggaacaaaggcagcccca

SEQ ID NO: 249016 - RNA, 82 nt, Homo sapiens
gcggcccgcggcggggacaggaaggaggacagcggcagggggaagaagagcgcaccgaaggcacaagggaaaccagaacaaa

SEQ ID NO: 249017 - RNA, 61 nt, Homo sapiens
aaccaacggaaaacggggggacacaggacaacgagagaagccgaagcgggggacccgccaa

SEQ ID NO: 249018 - RNA, 81 nt, Homo sapiens
cgaccgggcgcggcccccccgcgccacgcccgcggcgacgaaggacgaagcccggaagaacgaagcgcgcagaaaacacag

SEQ ID NO: 249019 - RNA, 68 nt, Homo sapiens
gaaaccagggagcagggcagggcacgcacacgggcagcaacggcgcgcccccacccggggccgagaac

SEQ ID NO: 249020 - RNA, 77 nt, Homo sapiens
cggagaggccgcaggagcacggaacccgagcgcagaggggaagcagaggacccaggcgaacagcaaggaggggacaa

SEQ ID NO: 249021 - RNA, 54 nt, Homo sapiens
ggccaaagaaagagaaaacccccaagcgcaccaggggccgcccacggggccgcc

SEQ ID NO: 249022 - RNA, 72 nt, Homo sapiens
cacacggacggcaccacccgcaacaagccgccagcaccaagagagacaagaagcaaacaaaaggacggaacc

SEQ ID NO: 249023 - RNA, 82 nt, Homo sapiens
cgcaaccccgcagagcgcaccacaaagcgcgcaacgccaacccaggcgagagagcaacagcccgaggggaaaaaagcgaaag

SEQ ID NO: 249024 - RNA, 80 nt, Homo sapiens
ggcagccccccagggaaccgaagggagcaaaagggacagcacagcagaggagaaccccggccgacaggacagcgcagaag

SEQ ID NO: 249025 - RNA, 79 nt, Homo sapiens
ccgcgccagccagcccgcgaccgcccgcgccggcaccggggcggccggccaaagccagaaaggaaacgacacaggaaga

SEQ ID NO: 249026 - RNA, 70 nt, Homo sapiens
cgccaggagggcggcgagcgagagacgaccacggggcgccaacacgagaagcgccaggaagggacgggcg

SEQ ID NO: 249027 - RNA, 78 nt, Homo sapiens
agagaaggggccagcggaaagcgggccgcccacgaacgggacccgaaaagggggagcacggcaaaaagcacgccgcga

SEQ ID NO: 249028 - RNA, 63 nt, Homo sapiens
aagaacacgaaaccgaaacacgcagaaagagagcgaaccagacccagggggcagaaggcaggc

SEQ ID NO: 249029 - RNA, 80 nt, Homo sapiens
gggccgccgagcggacccggaccggggggagaagaaaaagcagaaaggaacagaaaacaaaagaacaaggcacaacggac

SEQ ID NO: 249030 - RNA, 79 nt, Homo sapiens
gacgaagcggaaacacaggaacccagagaaaacccgaggagagagcccaaaagagccaaagccagcgcaaacagccgaa

SEQ ID NO: 249031 - RNA, 68 nt, Homo sapiens
agaacccaaaaaaaaggaacaccgcaagaccaaagacccacgcagaggagccagagagaagaagcgag

SEQ ID NO: 249032 - RNA, 70 nt, Homo sapiens
accggagccagaaacaaccgcaaccacccaacaagagacaggggaaacgaacaagaaagaagagcaacag

SEQ ID NO: 249033 - RNA, 59 nt, Homo sapiens
ggggagcagccgagacacccaggaagggaccacagaccagcacgccggcgccacgaacc

SEQ ID NO: 249034 - RNA, 36 nt, Homo sapiens
ccgagcccagcacgggagccgccgcgccaggcggag

SEQ ID NO: 249035 - RNA, 74 nt, Homo sapiens
ggacaaggcggcaaagcggggaggccagcgacgccaggaagaaaacggacggagaggacgccccacggccccca

SEQ ID NO: 249036 - RNA, 60 nt, Homo sapiens
cgcggcgacggcaggacgcgggcagagagcggacccgcgacgcgggccgcgccgggccca

SEQ ID NO: 249037 - RNA, 74 nt, Homo sapiens
cggagggccgagggagggccgagccagccgcggccggaggagcccccaggccccacaggaaaaggccgagacag

SEQ ID NO: 249038 - RNA, 79 nt, Homo sapiens
cagagacagcgccagaaccacggcaaaaagaaggaaccagcaaagcgccacgaagcacaagcaagaggaccagccaaaa

SEQ ID NO: 249039 - RNA, 82 nt, Homo sapiens
aacaagccaggccgggaaaggccaacagaacaagagagaccagggggaaggaaaagagagggcaggcacacaacgccggaaa

SEQ ID NO: 249040 - RNA, 72 nt, Homo sapiens
gggccagccgccccgcacccgaggacaaagggcggaaagggagccacagggagaagcagacacacagcgcga

SEQ ID NO: 249041 - RNA, 73 nt, Homo sapiens
cgcaaacaaggaggcaacccaggaggcagaagcgggccagaccaccggggcggccccccacccccaccgaaga

SEQ ID NO: 249042 - RNA, 82 nt, Homo sapiens
cgggcacagggcgcggacacagaaggcaaggaccagagaaaccaccagagaaagaagacgcagacagggagaccagaggcca

SEQ ID NO: 249043 - RNA, 79 nt, Homo sapiens
cgccccgaaccacgggaccagggccccggggcaggcaccccaggcccggccacagcaggccaggcaccaggaggacaaa

SEQ ID NO: 249044 - RNA, 68 nt, Homo sapiens
aaaacaaccagaaggggagaaggcaggcaccacaaaaaggacagcgaccaacgaggacaggcgccaaa

SEQ ID NO: 249045 - RNA, 69 nt, Homo sapiens
agagaagaagaacagagagaacaaaagagcagggaaacaggccagccacgcagcagcagaagccaggcc

SEQ ID NO: 249046 - RNA, 70 nt, Homo sapiens
cccgggcagccacccgcccagccccgagagcgggacacagggggggaggagggacaacacacaacgcagg

SEQ ID NO: 249047 - RNA, 90 nt, Homo sapiens
cgcgcggcgcgggacgcgcgcgggcacccacggagccccggggcggaagcaggccggggaccaaggggacgcggagcggacggcggaagg

SEQ ID NO: 249048 - RNA, 43 nt, Homo sapiens
acaaacgaaaagaagagccagcaggcacgacaggcagaaccac

SEQ ID NO: 249049 - RNA, 90 nt, Homo sapiens
agcaagcccacaccccgggaccgccgggagagccgcccaccccccacccggacgccgggcgcgcccggccccccagcagccagacggcgg

SEQ ID NO: 249050 - RNA, 77 nt, Homo sapiens
cgagcaaaagcccagaaggagccgggaaacaaaaagcacagagagaaacgacagcagcgaaacggaaagggcgacga

SEQ ID NO: 249051 - RNA, 66 nt, Homo sapiens
ccacgagcagaccccagaccaagacccacccaaccccgcgacgggaccacagggccacagggaaag

SEQ ID NO: 249052 - RNA, 76 nt, Homo sapiens
cgccagaccacagcacagccgggaaggggagccaccagcccccgcagacaagaaggaagaggaaggccgaagagag

SEQ ID NO: 249053 - RNA, 75 nt, Homo sapiens
aaacggaagcgcagggagaaggaagaggggaaaaggccaccaggcaacgcaccaacaacaccacacaaaaaaagg

SEQ ID NO: 249054 - RNA, 65 nt, Homo sapiens
acaagccgacaaggggcggaggaagggaggagacccgaccccagaaggaacaaaccgagcgaaga

SEQ ID NO: 249055 - RNA, 35 nt, Homo sapiens
aaaacaaagcgggaccagggcaaaagagggagggg

SEQ ID NO: 249056 - RNA, 73 nt, Homo sapiens
gggacgacgcccccgcgaccgccaccccgcccggaccgcgcggcagcgggccggcaacagcggagaagaccag

SEQ ID NO: 249057 - RNA, 56 nt, Homo sapiens
gagagcggaccgagagcgcgaaacgcacgagaagaggggagggcgacgacacccgg

SEQ ID NO: 249058 - RNA, 86 nt, Homo sapiens
cggcgccgagcgaacggggagccgagcggagcgccgcggcgcagccagaacccaggagaaacgagagggacagcaaggaagacgcc

SEQ ID NO: 249059 - RNA, 41 nt, Homo sapiens
agggccaaagaagggagagagaccccccaggcagcggcagc

SEQ ID NO: 249060 - RNA, 76 nt, Homo sapiens
ggaaagcacaaagcaagagacagcgaggacagaaggaagaagccaggaaaaagcccaggaggcggggaggcggaag

SEQ ID NO: 249061 - RNA, 97 nt, Homo sapiens
agacaagcaacgaagccggggaccagaaaggaacggcaagacaacaaggcccgagcgcccagcggaaccaacagccaggagcccggagagccagccg

SEQ ID NO: 249062 - RNA, 72 nt, Homo sapiens
acggcgcacagggcccaggaagccaaaccaggcgccagccaaaccaaagcgccaccagcgcggagacggaca

SEQ ID NO: 249063 - RNA, 65 nt, Homo sapiens
caggaccaaacaagacagaacgagagaccgggacaccggccaccacgcccccaccggcagccgcc

SEQ ID NO: 249064 - RNA, 63 nt, Homo sapiens
gaggaggcgcaagacgcgaccaaagccgacggggcaaggcaaggcagcaccccgacgacaaga

SEQ ID NO: 249065 - RNA, 57 nt, Homo sapiens
agcagcacagcgggccacagaacggaagagaagggacaacacaaaaggcccacagac

SEQ ID NO: 249066 - RNA, 83 nt, Homo sapiens
gacccacccgcgacccggacccggaccagccgaaaagccccgcccgcccggaaggagccaaccaaccccagggaggcaaacag

SEQ ID NO: 249067 - RNA, 87 nt, Homo sapiens
ggcgggagcagccagacacgcggagcgggagagcggccacaccagcgagacacacaacaacaggaggcaaacccacagccgaaaaga

SEQ ID NO: 249068 - RNA, 80 nt, Homo sapiens
cggaccgagagcgcgaaacgcacgagaaggaaaccacacgagacgcgacgagagaaagaggcgcccagcagagaaaggaa

SEQ ID NO: 249069 - RNA, 75 nt, Homo sapiens
accggggagagccaagaaaaacaacgccccagaacacagagagcagagaagaagacaagagcagacgagggagaa

SEQ ID NO: 249070 - RNA, 84 nt, Homo sapiens
ggagcgggcggagcggcgagagcccccacgggacaagacgcagaggaagggggcggcgggaggcccagccgggacagcacgggg

SEQ ID NO: 249071 - RNA, 79 nt, Homo sapiens
cagcacagaccaccgccaggaaggaccgagggcaccgcgcccgcagacacaccccaaacagaaacccagccaaccaacc

SEQ ID NO: 249072 - RNA, 58 nt, Homo sapiens
agccaagcaacagcccagcaaggaccagcccgccgcacccagggaaaaacagccggcc

SEQ ID NO: 249073 - RNA, 75 nt, Homo sapiens
aagacaaggaagagagcgcccaggaaggagccaaagcacaagaagaagacgagacgacgcagccagagcagcaag

SEQ ID NO: 249074 - RNA, 65 nt, Homo sapiens
ggagaccgcaagcccacagagagccaggccaaggcgcgaaaagccccccgggagcagccagaaca

SEQ ID NO: 249075 - RNA, 77 nt, Homo sapiens
cggagcaccgaaacgccgaaaacgagccggacacccaccggcccaagaaggcaccccccgcccacaggccaccgcac

SEQ ID NO: 249076 - RNA, 79 nt, Homo sapiens
gaacaccacaggaaggggacagagagggaaagccggcccacgagaccccaagaccgagcaggaggacagaagagaacga

SEQ ID NO: 249077 - RNA, 39 nt, Homo sapiens
aagagcagagacaggagggcaggagcgccaagcaagacc

SEQ ID NO: 249078 - RNA, 74 nt, Homo sapiens
caagagcgacaggaggagacaggcgagagaggaggacacgaccgggggagaggcaccagcaacagaccaaccgc

SEQ ID NO: 249079 - RNA, 72 nt, Homo sapiens
caccgagcgagacacgcggaacaaacgaagaagggacggggagcaccagccaaggccccggcccacagggag

SEQ ID NO: 249080 - RNA, 70 nt, Homo sapiens
gccccccgggcccccagcagcacggacaacgggggcggcagcgcgggcagcgacaggagacgagacaaga

SEQ ID NO: 249081 - RNA, 81 nt, Homo sapiens
gcacgcacggacacccgagcacagagacgaagaggaccaggagcaaacagaacgcacacacaccccaagacaagaccgcga

SEQ ID NO: 249082 - RNA, 75 nt, Homo sapiens
ccgaaaaagccgggaaagcgccaggagccgagccggccaccaaagcgcgcagcagcgcgcagcgcgcggccgagg

SEQ ID NO: 249083 - RNA, 83 nt, Homo sapiens
agagggaaggcaaggaggcgggacgccgcacggccgcgaagagccgcgggggagggaagaacagacacagcaccgacacgcgc

SEQ ID NO: 249084 - RNA, 58 nt, Homo sapiens
cccaacgaagagacgacacaaggagacgaggggaagaggagacaaagaccaccacagg

SEQ ID NO: 249085 - RNA, 74 nt, Homo sapiens
aaagggcacaaggaaggcgagagacgaagaccacagggaagccgagaagccagcaccgaggggagcgcggggac

SEQ ID NO: 249086 - RNA, 57 nt, Homo sapiens
gccccggcggagaccacgcaaggccacaggcgaggcccgggcagcgggccagcggga

SEQ ID NO: 249087 - RNA, 38 nt, Homo sapiens
acagcccaggagacaaagccggccagaggacggcagcg

SEQ ID NO: 249088 - RNA, 79 nt, Homo sapiens
gccacccacccaagaaccacaacgagacaaaccgccaacgccagccaacccaggaccaagaggggaggagggcaagaaa

SEQ ID NO: 249089 - RNA, 73 nt, Homo sapiens
gagggaaagagaagaaagccaggggagagagagccgggcagacccgaaaagcggacgacaagggaacagcgaa

SEQ ID NO: 249090 - RNA, 67 nt, Homo sapiens
gaaaaaccccggaagggcggacaccccacacgccgccacccccaccggagcggcacacgggggacac

SEQ ID NO: 249091 - RNA, 80 nt, Homo sapiens
cacccgacagcggcacaagagggggacacaaagaaacagagggcgaggaaggggaagaaagaagacaagccagcgccagg

SEQ ID NO: 249092 - RNA, 59 nt, Homo sapiens
gagggcaggaaggcaggcgggcagagcaaccaaaacaggacaagaaacaccaaacaagc

SEQ ID NO: 249093 - RNA, 57 nt, Homo sapiens
ccaggaagcagacacaagagaccccaccccggacagaagcaggccaaccacgcggaa

SEQ ID NO: 249094 - RNA, 76 nt, Homo sapiens
cccagagcccacacccgcagagcgaggaccggaaggaccaccgcaaggcggcagagcggggaaacccaaaggaaca

SEQ ID NO: 249095 - RNA, 88 nt, Homo sapiens
ccagggcgcccaaggaaggccagggagcagacccagagcaggagaggccaggccaaagagcaaagacccaagacggagggcccggaaa

SEQ ID NO: 249096 - RNA, 85 nt, Homo sapiens
aaaaagcggaccaaagacccaggaagacagggaccaagaaaggcccagggaccaaagcccggacaaggcccgagcaccaggaccg

SEQ ID NO: 249097 - RNA, 92 nt, Homo sapiens
gaccgagggaagcaaggcggacgcaacagccagcaaaggaacagcccggcagaacacacagaaccacacagggacaggcacccaccgcaggc

SEQ ID NO: 249098 - RNA, 85 nt, Homo sapiens
gacacagcggagcgcccagaggcgagcccggggaggaagaggaacgaggaagagaggaggaagagagaaggacaaaggaaaacga

SEQ ID NO: 249099 - RNA, 77 nt, Homo sapiens
ccggagcggccgcgagccaccgaggcccagaaccaagaccggcagcgggggagaggggcggggccaacgggggcccc

SEQ ID NO: 249100 - RNA, 80 nt, Homo sapiens
caagaaagcgccaaaaacaacaccaaaaagccgcagggacacagaaaaggagaccacggaagacggacaggcaaaagcgg

SEQ ID NO: 249101 - RNA, 71 nt, Homo sapiens
agaaccagagaaacacaaacgggggccaaagcaaggggggagggcaaccaggccaaaaacagaggaggaag

SEQ ID NO: 249102 - RNA, 71 nt, Homo sapiens
agccacaacacaacaccacggggccccagagaagaaccaacccagcaaaaagaccacagcgccaaagagaa

SEQ ID NO: 249103 - RNA, 55 nt, Homo sapiens
acagcgaggacagaaggaaggcccagaaaaagagaccaggagcgcgcaaaaggag

SEQ ID NO: 249104 - RNA, 78 nt, Homo sapiens
ggaagacccagacggcccgaaggccacccgggccagcgcgcccggcgggccagccccaggaagcacggccagcccaga

SEQ ID NO: 249105 - RNA, 56 nt, Homo sapiens
cggacccagccccagaacgcagagacagggggaacaagcacgcacacccagagggc

SEQ ID NO: 249106 - RNA, 79 nt, Homo sapiens
cagcaaagcgggcacgagcagcagccccagcccagcgcaagcagaggaaccaaccagaggcggggccaaagcacagaac

SEQ ID NO: 249107 - RNA, 79 nt, Homo sapiens
cacgacacccaaacgggacccgggaagggacacggaggaccgaggaagaaggcacgaccgacacaagaagcgcgggccc

SEQ ID NO: 249108 - RNA, 77 nt, Homo sapiens
gggccggcgcaggcggcgcggagagggggcgcgagcggggaaccccggaaaaggagacagaagcgcaagaacccgac

SEQ ID NO: 249109 - RNA, 74 nt, Homo sapiens
gaacccaagaccgcaaggagcagagccgaacccggagcaggaaaggacagggaagcaggagcgaccgcccaccg

SEQ ID NO: 249110 - RNA, 78 nt, Homo sapiens
aggagagaagaaccaaagaagcaaaacacgagagaagagcagacccagccaggcggccccacagcgggcccggccaaa

SEQ ID NO: 249111 - RNA, 85 nt, Homo sapiens
agaaaacaggaagagggggaggcaaagccgaaagggagaggcaacgggaaaccccaggaagacagaaagaaagacccgaaaaagc

SEQ ID NO: 249112 - RNA, 79 nt, Homo sapiens
cgccacagaaccgcccaaaaaggcaaagaaaccacgagacgcccaggcaggcgacgggagcggagaacacgccaccggg

SEQ ID NO: 249113 - RNA, 68 nt, Homo sapiens
cccagacggagggcgggccgaggccgcccagccccacacgggagcacaccagcaagaagacacccacc

SEQ ID NO: 249114 - RNA, 73 nt, Homo sapiens
gggagcgcaccgcaaggcacaacaggccgacaaggaaaggccgccccggggcaccgagaaacagaaaagccgc

SEQ ID NO: 249115 - RNA, 59 nt, Homo sapiens
ggaaagacagcccacagccagcagaagaaccaggacaagaacgcgccacaaagacgaaa

SEQ ID NO: 249116 - RNA, 75 nt, Homo sapiens
gacggaccgagaccggaccgagagcggaccgagagcgcgaaacgcacgagaaggccgaccagagaagcacagcgg

SEQ ID NO: 249117 - RNA, 82 nt, Homo sapiens
gagaaaccaaggaccaagaaccacggacaagaccgagacacccaccacagcagcaggggaaagaagccaaggaaaaagcacc

SEQ ID NO: 249118 - RNA, 68 nt, Homo sapiens
cccaccggcacagcggaccccgcccgaggacggaaaacaggaaaagcaccacgccacccgggaaggaa

SEQ ID NO: 249119 - RNA, 54 nt, Homo sapiens
agaggaccggcagcaacgagccaaggacccgcagcaaagcgcgacacccgcagc

SEQ ID NO: 249120 - RNA, 69 nt, Homo sapiens
gccgccccaacaccagggaagagacacacccagggcaggcagaagggcacggacgaggagccgcgaacg

SEQ ID NO: 249121 - RNA, 81 nt, Homo sapiens
cgcggcgcgggcagccgggaggagacaacaacaagagcaccccggagccccaccgagcagcgaacccgcacagccaacccc

SEQ ID NO: 249122 - RNA, 82 nt, Homo sapiens
gaaaaggcggacgggaaggcgggagacgagaagccgaaaagcgcagcgagcggagccgccggagaaacagccacccagcgac

SEQ ID NO: 249123 - RNA, 84 nt, Homo sapiens
gacgagagcgagcgacccagcccgcgagcgagaggccacgcaagcccccccgggagagcaggaagacagcagggacccagggag

SEQ ID NO: 249124 - RNA, 41 nt, Homo sapiens
gcggaagggaacagacacaggagaaaaaccagaagcgaaga

SEQ ID NO: 249125 - RNA, 70 nt, Homo sapiens
ggaagaaagacagagcgggcaccgaacgcaacagcccccggccacgcagggcggcacaaacaaggaaaca

SEQ ID NO: 249126 - RNA, 76 nt, Homo sapiens
gcgcggcacagcgccgccagcagggccgaccaggacaagggggcgaaccagaggaccgggggggagcagaggacgg

SEQ ID NO: 249127 - RNA, 76 nt, Homo sapiens
ccagaccgaggcacccccccaagcaagggcagagccccacaacaagccggagaacgcccagaccgaaaaccagaaa

SEQ ID NO: 249128 - RNA, 80 nt, Homo sapiens
gcagggcaccgcgcgaagcggccaaagccgcccagacggccaccggcgggaggaacaaaaggcagaaggaacgagggagc

SEQ ID NO: 249129 - RNA, 64 nt, Homo sapiens
caggacccccgggaggccagagccgaggagcggcagagaggggacggagcggagaccaaggccg

SEQ ID NO: 249130 - RNA, 79 nt, Homo sapiens
acgagccacagagcagaacagaaacaaacagaggcaccgccccccaaagggagaagaaagaacaaagacaaggaacagc

SEQ ID NO: 249131 - RNA, 70 nt, Homo sapiens
cgcccgcgcgcaggggaagcgggcaggcacaaggcacaaagcaggaggcaggaggccaggaagaggccca

SEQ ID NO: 249132 - RNA, 75 nt, Homo sapiens
gaacaaccacagccacccaggacccaggggcgggaaagaaaggaagaaaacagggggaagcccagaggaccagcc

SEQ ID NO: 249133 - RNA, 69 nt, Homo sapiens
aaagcagagcccaggagaaaccggacgcgacgggaagaaagaagccaaagagaaggcaaagcaggcgga

SEQ ID NO: 249134 - RNA, 80 nt, Homo sapiens
ccgcaaacgaaaaagaacgacagagcaaccaggaaagaagagggaaccgaggagcaaggaccgggagaaacgagaccaag

SEQ ID NO: 249135 - RNA, 79 nt, Homo sapiens
acagaagagagggagcaagcaacagccacagggggccagggaagcaagcgggacaagaagagaaggcgcacagcacaca

SEQ ID NO: 249136 - RNA, 66 nt, Homo sapiens
gacacaaaaaggcaccaaaagccgcacaggggcagggaaccgaaagacaagaggagcggccgcgcc

SEQ ID NO: 249137 - RNA, 47 nt, Homo sapiens
gagcggggccggccacaggagcacggggccaaccccggccgggcgga

SEQ ID NO: 249138 - RNA, 87 nt, Homo sapiens
aagagcgcagcccccggcggaccccaagaagaagcggaagaggagccgcggaaccaagacacaaggaacagaagacaggaccaggaa

SEQ ID NO: 249139 - RNA, 49 nt, Homo sapiens
ccaggaggacaccaacgcaccgccgcgggccagaaacagagaggcagac

SEQ ID NO: 249140 - RNA, 81 nt, Homo sapiens
cgggagggagggggaggccaggcccaagacgccgcgcgaggccagcacccagaaaaagcaccccgaggaggaagacgaacg

SEQ ID NO: 249141 - RNA, 72 nt, Homo sapiens
gaccagggcggaggggccaacacaaacgagaaaagccaagcccgagcaggagaagacaaccacacaggaaaa

SEQ ID NO: 249142 - RNA, 77 nt, Homo sapiens
caggaggcgaaaaccagaggaagaagcccgacggccaggaggcgaagagacgaggaagcccaggagcccgaacacaa

SEQ ID NO: 249143 - RNA, 36 nt, Homo sapiens
gccaaaccgagaggaccacagacacaaaaggaggac

SEQ ID NO: 249144 - RNA, 76 nt, Homo sapiens
cggggcggcagcgcggacccgcccggagagagccacagaccccgccggggaagaacaggaggggagcgaccagcac

SEQ ID NO: 249145 - RNA, 66 nt, Homo sapiens
cgccggccgacggccggcgggcgggggccccgcgccgcggccgagcagcggcccccagacgaggaa

SEQ ID NO: 249146 - RNA, 78 nt, Homo sapiens
aggcgcgcgcacagaaggagaagagcaacaaagggccaaccgccaggaaggaagagggacaaggaaaggaggagcaag

SEQ ID NO: 249147 - RNA, 58 nt, Homo sapiens
cccccgcccagagacggacaccacgccacaacaggccgggcgccccccaagaccgaag

SEQ ID NO: 249148 - RNA, 80 nt, Homo sapiens
cccaaaacaggcacagacggcgacggccacacgcgggagagacggcaggacacgagcgggagaggaggcaggaaaacggc

SEQ ID NO: 249149 - RNA, 111 nt, Homo sapiens
aaaaccgcgcagcccacggcaaccaagaagaagaaaggcaaaccagacggggacccagacgaggaacagaaaagagaaaccagggagcgcccaagaaaccaagaagaacac

SEQ ID NO: 249150 - RNA, 76 nt, Homo sapiens
cgccgaccccaggcagccccgcacgagcggcaaccgaaagccagcagcgggagcacccgaagaagacaagacaggg

SEQ ID NO: 249151 - RNA, 39 nt, Homo sapiens
ggcagagcaaccagaacaggcccggcgggccagcgagac

SEQ ID NO: 249152 - RNA, 73 nt, Homo sapiens
cgcgaaacgcacgagaagagccgagggggccaccgcgcccgcaaaacgccgccgcggcccccagccccagccc

SEQ ID NO: 249153 - RNA, 83 nt, Homo sapiens
cgacgggaggcaccaccggagcgccagccgagggaccaaggggccgggaggcgccggagaccaagggagccaccccagaaagc

SEQ ID NO: 249154 - RNA, 53 nt, Homo sapiens
gagaaaaggccaagaaggcaggggaaacggggaaccgcacaaaccaagggggg

SEQ ID NO: 249155 - RNA, 56 nt, Homo sapiens
ccgagggccaagaagggaaagaagcagccggacagcagagacggggcgccagggcc

SEQ ID NO: 249156 - RNA, 76 nt, Homo sapiens
cccaaagcaacaccaacacaaggaacaggcgcccgaagggcaaaacagcagccagaagaaccagaacaagaagaac

SEQ ID NO: 249157 - RNA, 46 nt, Homo sapiens
gacccccgacccccagagacaacccccaaggggaagccaacagcgg

SEQ ID NO: 249158 - RNA, 75 nt, Homo sapiens
ccgcaagcaagaggccaggacccgccagggcgcgaccagaagaagaacaaacagcagaaagaaaccaaggagaca

SEQ ID NO: 249159 - RNA, 77 nt, Homo sapiens
caaaaggaagcaggggagggccaaggaagaaagaagagaacaaagaacgcacaagggacagagccccaagggggcac

SEQ ID NO: 249160 - RNA, 83 nt, Homo sapiens
agccagggaaccacggagcacgagaaaacggcggggccacagaccccaccagcacgaagggacacgggggcagaaaaccaacc

SEQ ID NO: 249161 - RNA, 71 nt, Homo sapiens
aaacaaaaagcgaggaaagcgacaacagaggccacccagcaaaacaggcaaaagagacagcgaaaggacac

SEQ ID NO: 249162 - RNA, 66 nt, Homo sapiens
cgagcggcggggagcggcgaagccgcgggcgagggaaagcaggcaggagggagagcgccgaagaac

SEQ ID NO: 249163 - RNA, 78 nt, Homo sapiens
gaaaggaacccacaacgaagggaagccacggaagaaaggccaagccgacgccagcgggcgccacccaacaggcgcacc

SEQ ID NO: 249164 - RNA, 77 nt, Homo sapiens
acgcccccgggcaggacccggacccggaagagaagagggggcaagaaaggcagaagcggaggaagcccggagacaag

SEQ ID NO: 249165 - RNA, 70 nt, Homo sapiens
acggaagcgagggcacgggcggcagcccgagaccgcagcaggacgaacgagagcaccacccgagccggaa

SEQ ID NO: 249166 - RNA, 72 nt, Homo sapiens
gaaaggaggaagaagacaccggggacagacagggaaaggcagcaacaggggaagcggagggaggcaaagaag

SEQ ID NO: 249167 - RNA, 80 nt, Homo sapiens
gagcacgaaggacccagcagggcaccaggggaccccgaagcaggaggcccaaggaacagcacagcagcgacacacggacc

SEQ ID NO: 249168 - RNA, 60 nt, Homo sapiens
ggcgaagcggccgagcaggcgagcgaacgacggacccgacaaacggacagcaggaccaga

SEQ ID NO: 249169 - RNA, 105 nt, Homo sapiens
cggccgagaccagccagggagcgcgaaccgcccgcggaaccacagcccagcacggcaccaaggagacagacgagccggcgcagaaaagaaggagcgggcgccaaa

SEQ ID NO: 249170 - RNA, 71 nt, Homo sapiens
accccagacgcacgggcagacgagaccggagaaggaaagacaagccgagagagggaggcccgaggaagagc

SEQ ID NO: 249171 - RNA, 52 nt, Homo sapiens
accacacgggggcaggacggcagggggaagaaggagccgcagccagaaaagg

SEQ ID NO: 249172 - RNA, 70 nt, Homo sapiens
gagagccgaggagccagagcaaggggaacgccacggacggggaaacagaagacagccgaaccaagggcga

SEQ ID NO: 249173 - RNA, 72 nt, Homo sapiens
ggggaggcaaagggaggaggaggaccggaggggaacaaacgaaagccacaccccagggggaaacagggggcc

SEQ ID NO: 249174 - RNA, 72 nt, Homo sapiens
gaaagacccaacagaaacacggaccgaaagagggccaaagaggaggagacgagaaagagcggggaaggcaaa

SEQ ID NO: 249175 - RNA, 60 nt, Homo sapiens
ggaccagcgcgaaagagaccggacgcagccgccaccgagacgagggcaggaccgaggacg

SEQ ID NO: 249176 - RNA, 68 nt, Homo sapiens
ccggcccacgcgcaagggacccaaaggaccggcgggaaaacggcacaaggcgacgagggagggcagac

SEQ ID NO: 249177 - RNA, 73 nt, Homo sapiens
gcggacccgcagccccaaagacagagcagccaggccacgagccagaaccgagacacacacaggaccccaaaac

SEQ ID NO: 249178 - RNA, 63 nt, Homo sapiens
ggacccagccacgggggggccgcaaaagacaagccccagaccaggagcgcaacacagacaaac

SEQ ID NO: 249179 - RNA, 56 nt, Homo sapiens
gcgaacgccaccagcgcggcacggagcgccggcagggaacgcgaggacagagcaag

SEQ ID NO: 249180 - RNA, 73 nt, Homo sapiens
aggaaagaccacagccgagcccagccaggcgcaaaagggccaaaaaccacagagaggccgaaagacaacagca

SEQ ID NO: 249181 - RNA, 77 nt, Homo sapiens
gaaggacaggaaaaggcccaaaaaggacacggcgcagcaacaaacagcggcgacaaaccgagacagcacagccacca

SEQ ID NO: 249182 - RNA, 79 nt, Homo sapiens
agacggccaccggcgggaggaacaaaagggggcacccgaggaggaagagggcagggcccacggaaagaagggaaacccg

SEQ ID NO: 249183 - RNA, 80 nt, Homo sapiens
aaacagacccgaagagaagcccaaagacaggaagaaccgaggcagacagaacaagaaagggacaccaaggcccccaaggg

SEQ ID NO: 249184 - RNA, 82 nt, Homo sapiens
aaagggggagaggacaaagccgccaaggcagcagaacacggcggagccgaaagacggcaaggacggagcagcagcaaggagg

SEQ ID NO: 249185 - RNA, 84 nt, Homo sapiens
ccgcggcagccgcggaccaccgccgccagggacgagacaagggcaacgagacacccagcggcccggccccgccgggagaccaca

SEQ ID NO: 249186 - RNA, 81 nt, Homo sapiens
ccgaggaggagcacccacgggacgccccgccagaccgcgaccgcacgccagcccaagccgacaggaccagaacagagaaga

SEQ ID NO: 249187 - RNA, 89 nt, Homo sapiens
gcgggcggcggggacagcggggacggcacggcgcgcgcagacgcccaggaccacaccgcagcgaacgcaggccccagcgaaaaaggggg

SEQ ID NO: 249188 - RNA, 79 nt, Homo sapiens
ggccgaggcgccccaacgagcggggcgggagggcgaccccaagggacagcgagcccgaaagaagagacacaccaggcaa

SEQ ID NO: 249189 - RNA, 81 nt, Homo sapiens
agagagagcaagaggaagcagggggaaagagggagaagaaaaagcagaaaggaacagaaaacaaaagaacaaggcacaacg

SEQ ID NO: 249190 - RNA, 79 nt, Homo sapiens
aagaagccaagagaggaaagcagcagagcacaaagcagaagcacaaagcccgaagcaggcaggaccggaaggaacaaca

SEQ ID NO: 249191 - RNA, 78 nt, Homo sapiens
agcagcaaaaaaaaagaagagacagaagcaggggaaccaacagaagggaagagggggccaggaaccagaagacgagga

SEQ ID NO: 249192 - RNA, 59 nt, Homo sapiens
cgggacagaaagcagggaggggaaaaggcacagaaaacgaacgagaaacgagggagaag

SEQ ID NO: 249193 - RNA, 68 nt, Homo sapiens
caggggccagagagacccgccggccgaagacggccggcaacaccggcgaaagaaccgaggaagccggg

SEQ ID NO: 249194 - RNA, 55 nt, Homo sapiens
aagcacccccagagggccggcccagagcgagcagacaggaggacaggcggcaagg

SEQ ID NO: 249195 - RNA, 71 nt, Homo sapiens
agagagcgagcgagggggggcgcgccggaaaccggagcgcgcagcagggccgcaagagacaccacaaaagg

SEQ ID NO: 249196 - RNA, 50 nt, Homo sapiens
gcacaagaccgggaggggcaaacccagcaggaagccacgggcgaaacaga

SEQ ID NO: 249197 - RNA, 71 nt, Homo sapiens
ggcaacagcccgacaaggacacgagaaaagacgaccgaggagaagacagagcaggccggaggaagaaacag

SEQ ID NO: 249198 - RNA, 68 nt, Homo sapiens
aacgccggggagacaaaggcacagggggacgaaacgaacgacagaaacccaagcagagaaaggggaga

SEQ ID NO: 249199 - RNA, 72 nt, Homo sapiens
caacaggccaggaacagggcaccccccccagcccagaagcagaagaaagaaaaagacaaggcagagcgcgga

SEQ ID NO: 249200 - RNA, 59 nt, Homo sapiens
cgagcggcgggcgcggcgcaacggcgcgcacagagacagcgcagaggagccaaagccac

SEQ ID NO: 249201 - RNA, 78 nt, Homo sapiens
gcgggccgcaggccgcgagcagcggacgccggccgccgcaggagggcggagaacggaaaagcaccaggaagcagagag

SEQ ID NO: 249202 - RNA, 55 nt, Homo sapiens
ggaaaggaacccagcaacaagaggaacccacccaaaagaagcaccccaagaagcc

SEQ ID NO: 249203 - RNA, 69 nt, Homo sapiens
gcggccacaccccaggagcagccaccaaggggagcaccccgggcgccccaggagacaccgcgccaggag

SEQ ID NO: 249204 - RNA, 70 nt, Homo sapiens
agcaccagacccccagagaaagagggcacacagggcacgaagacagaaggcccggggcggacgcaggggg

SEQ ID NO: 249205 - RNA, 74 nt, Homo sapiens
ccgaggcgagacggaaagaacaccccaccagaccacccagcaagcccacaaaaaaggcacaagcagggacagcc

SEQ ID NO: 249206 - RNA, 37 nt, Homo sapiens
caagcgaaaaacaggcaaggggaacaacggaccggcc

SEQ ID NO: 249207 - RNA, 43 nt, Homo sapiens
ggcacaggggcaagaaggaagcacaccacaggaagagcaagaa

SEQ ID NO: 249208 - RNA, 86 nt, Homo sapiens
gaagaaaacggcaaagggccgggcgggcaccaccagggggccaacggagaagcacaggcagagacacaagcagccgaaaaacaggc

SEQ ID NO: 249209 - RNA, 53 nt, Homo sapiens
aaagaaagaggaggacggagccgcacagcggaacacgggcaacgggggaagac

SEQ ID NO: 249210 - RNA, 55 nt, Homo sapiens
aaacaagcgggaaccaaaaagacaccggcgaacaacccagcgggacaaaacccgc

SEQ ID NO: 249211 - RNA, 68 nt, Homo sapiens
gagaaaagaagacgacacaggcagaccggccccccaaacacccgagcccagccccgccccgaccacca

SEQ ID NO: 249212 - RNA, 56 nt, Homo sapiens
aagccgggaaagggacaagaagggcaaagccgaagccagggcacccaaaaacaaac

SEQ ID NO: 249213 - RNA, 59 nt, Homo sapiens
gacgcaccggcacccaaccaggagggacgaaagggaggagcagcgcccggcacagacca

SEQ ID NO: 249214 - RNA, 72 nt, Homo sapiens
ggaaacgggaaaaccaaaaaagcaagcacaccaaagagagcgccagaaagagcaaaacacagagacgcggcc

SEQ ID NO: 249215 - RNA, 76 nt, Homo sapiens
gacgagagcggagacgagggagcagcagccacgaacccggaccccagaaaagaggaaggagcaacccacgcagcac

SEQ ID NO: 249216 - RNA, 70 nt, Homo sapiens
cagggcccgaaccccggggcgcagcggacggcggcacacagggagagagaccaaggaagacgagggagac

SEQ ID NO: 249217 - RNA, 89 nt, Homo sapiens
gaaacagagagcaagcacgcagaagacgagaaggggccaaagacacgcagagcgaagccaccacaggggagaagcgagacaggaaaggc

SEQ ID NO: 249218 - RNA, 76 nt, Homo sapiens
aggcgccaaacaagaaaaacaaagccaaggaaaccccaacacagagccaagcgccaaggcagaggcaaaaaagcca

SEQ ID NO: 249219 - RNA, 82 nt, Homo sapiens
cgggcaacgagaaaaagccaagaacagcaccagggaagccccagccgggggcccgccgcaaaagcagaggaacagcaaccag

SEQ ID NO: 249220 - RNA, 84 nt, Homo sapiens
gcagcgggccgggcagggaggggcgcgcgccgcccagcgcagcccccgaacgcggcccgcacagagggccacagaagaagagac

SEQ ID NO: 249221 - RNA, 82 nt, Homo sapiens
gggccaccggaggcgggacacccagcaccccacgcccggccgacaagcacgcaaggcgcaagaggcagacagacaggcgacg

SEQ ID NO: 249222 - RNA, 93 nt, Homo sapiens
gagggggaggaagcaggggaaagcccgggccaagcgggaggcgccagcccaaaaggcagagcgaggagagaagaaggagggaaagccaaacaa

SEQ ID NO: 249223 - RNA, 60 nt, Homo sapiens
gaaaggacagaacaggaccggaaaggaaacccaccagagaaggcgcggccacccaggacc

SEQ ID NO: 249224 - RNA, 77 nt, Homo sapiens
ggcaagaaacagcgcagcaccccgagcacgcacaacaccaccacggaaaggcaggagagcgaaagagagcggaaaaa

SEQ ID NO: 249225 - RNA, 74 nt, Homo sapiens
agacgaaaccgaacgaaaggagaaacggaaaagacccccagacgaacaagccaagcccgaagcagaggggcacc

SEQ ID NO: 249226 - RNA, 73 nt, Homo sapiens
caccccaacaggaaacaaggcggggccgggcgggccgggaagggcaaggcagaagcccgaaaaaaaagccagg

SEQ ID NO: 249227 - RNA, 58 nt, Homo sapiens
ggcacgacccccccagaggcgagacgccaaggccccaaaggacaaagcacagacagca

SEQ ID NO: 249228 - RNA, 74 nt, Homo sapiens
cagcaccacgaccggcgaggacccagagcaacacaccaacggaagaaaaggcaaccccgcacaaacccagcgaa

SEQ ID NO: 249229 - RNA, 63 nt, Homo sapiens
acaagcaccaagagcgccaaacagggaccaagaaaggcccagggaccaaagcccggacaaggc

SEQ ID NO: 249230 - RNA, 63 nt, Homo sapiens
aaggggacgaaaagcagcacaagcaggaggaacgcagggccagacccaagaaggagaagcccc

SEQ ID NO: 249231 - RNA, 77 nt, Homo sapiens
aaagccccccacgccaccacagagcaacccgcgcaggaagacaggaacaagaaaaagaaggagaccgaagcaagaag

SEQ ID NO: 249232 - RNA, 79 nt, Homo sapiens
gggcgagcgagcccggcgacggggaggacgcacgacgcgcggcacgggaacgcagccggcacaaccaccacgcgagccc

SEQ ID NO: 249233 - RNA, 74 nt, Homo sapiens
acaagcggcagaaggagcgacagagacggagcggagaacacgagcgggcaccgggccacaaacgaacagcgaaa

SEQ ID NO: 249234 - RNA, 87 nt, Homo sapiens
aaaaaccggaaaaagaagccaagaagcaaaaaagggacgcaagaagaaccaccaggacagcgacagcagacaagcaacacaagggga

SEQ ID NO: 249235 - RNA, 32 nt, Homo sapiens
acaacacgaccgacaggagagggcgccacaaa

SEQ ID NO: 249236 - RNA, 72 nt, Homo sapiens
gagaggcagcaaaaccccgcacgaaaggccggaaagaggggaggggcacgcaacaacgaaacggccaccgcc

SEQ ID NO: 249237 - RNA, 86 nt, Homo sapiens
aagaaagacacccaagaaggcaagaaacaacagcgcccgacaagccaggaggagaaggagaagcggcgcccgaccagcggaacgaa

SEQ ID NO: 249238 - RNA, 73 nt, Homo sapiens
caccccaacccaacaacacccagcagcgccaggaaggcggggaagagaaagggcccaacaaagccaggaccaa

SEQ ID NO: 249239 - RNA, 56 nt, Homo sapiens
cagcccacccgcagccacgcaccgaccacggcagccccgggccggggacgacaacc

SEQ ID NO: 249240 - RNA, 73 nt, Homo sapiens
cacaaagagcccacccggaaaaggccacgagagacccaacaggaccaggagcgcaacacagacaaacgaagaa

SEQ ID NO: 249241 - RNA, 68 nt, Homo sapiens
acagaaggacgaagagcgacagggcccaacgcgcaggccacgggccggcggggaaacccaggcgaaca

SEQ ID NO: 249242 - RNA, 95 nt, Homo sapiens
cacggcccacacacccaggcgcggagggaagacgcccgggccaccaagcaagcccggacgaggggcaggaccggggacacacgacgcgggacgag

SEQ ID NO: 249243 - RNA, 50 nt, Homo sapiens
aaggaccaagaaccagggacaaggcccaggaggccaccagcacggccacg

SEQ ID NO: 249244 - RNA, 80 nt, Homo sapiens
cggacagcggacagcgggcgcagcacgcgagagcaggacccaaggggccggcagagaaggggaagccggggcaggggcgc

SEQ ID NO: 249245 - RNA, 70 nt, Homo sapiens
ggaaccaggcagcccagagccggacgagcgggagaggacaccacacaaaaaacaggaaaagagaacaggc

SEQ ID NO: 249246 - RNA, 78 nt, Homo sapiens
agccggacggggacagcgcagggccaggccgcagcaagggcacaagagccccagaggggacaaaaaacaaggaccggg

SEQ ID NO: 249247 - RNA, 65 nt, Homo sapiens
aaggaccaagaaccagcaagggcaagagaacccccaaccaaagaaggacgcccagggacacacgc

SEQ ID NO: 249248 - RNA, 68 nt, Homo sapiens
ggagaacaacacccgggcagcgcaagacagcggagagaacccccgccacgaacgacgcacggaggcca

SEQ ID NO: 249249 - RNA, 73 nt, Homo sapiens
gccacacccccaaccccccaagcacgggacagggcagggggccagggcagccagggccaggaaacacagaggg

SEQ ID NO: 249250 - RNA, 37 nt, Homo sapiens
gcccacgggccgcgccaggacgcgaagcccagccgag

SEQ ID NO: 249251 - RNA, 78 nt, Homo sapiens
gaccggagcgcacccccccagcaccgggccaccgggccccccccggaccacaccagcaaccagacgacccaaaaagca

SEQ ID NO: 249252 - RNA, 75 nt, Homo sapiens
cacaagacaggaaacagggaacagaggaggaaaaacgcaagggaaaagagaaaaagaaagcgacggaaaaaaaca

SEQ ID NO: 249253 - RNA, 69 nt, Homo sapiens
cagacaggggcaaccaagaccgaagagcaggagagaaagaaggccacccagggaaaagaggaccagacc

SEQ ID NO: 249254 - RNA, 80 nt, Homo sapiens
cggcggaagccacagcaggagaaggcagagagcagcgacaagacaagccccagcccagaaaccaccccggacaggaagcc

SEQ ID NO: 249255 - RNA, 77 nt, Homo sapiens
ccgggccgcaggagccgggccgccgaggcgggcaagccaagaggggacaagcaagagcgcaaagcacacggcacgag

SEQ ID NO: 249256 - RNA, 66 nt, Homo sapiens
gaagaaaggacagagcagaccaacacaaaccagagcacagggaaaacgagagaacaacagggggga

SEQ ID NO: 249257 - RNA, 73 nt, Homo sapiens
cggaagagcgccccaggagaaacaagaacagggaagagccaggccggcggggcacgcccgaacggaccccacc

SEQ ID NO: 249258 - RNA, 88 nt, Homo sapiens
cgccggcgcgaggacagcgcggcccgcgaggagccgccgcgcgcccgcgcccccgcgcgacgccagccacccaggcccaggaccgagc

SEQ ID NO: 249259 - RNA, 69 nt, Homo sapiens
cgcggcggagccacccgcacacgcacccaggggcagccgcaaggacagaaagaaaccaggcaccaaagg

SEQ ID NO: 249260 - RNA, 58 nt, Homo sapiens
cccccaaaggcggaacaggcgggcccgccgcacaccgagagccccacgaaggcccaca

SEQ ID NO: 249261 - RNA, 84 nt, Homo sapiens
gcgcgcgcaagagaaaacgacgaacagaacgaacagaaagagaagcggccagggccgacccacagagcaccccagccacgcgag

SEQ ID NO: 249262 - RNA, 113 nt, Homo sapiens
gcccgggaggaaggaacgaggcaaggagcaaagcagcggcgcagcccggggggacggcaaaacagaacagaaaggcggagaaaaaagagggggaaaagaccacgagaagacag

SEQ ID NO: 249263 - RNA, 62 nt, Homo sapiens
cccccccaggacacaggagcaagggacgcagaaaacgcacagcacgagaaaagcgaaaagaa

SEQ ID NO: 249264 - RNA, 74 nt, Homo sapiens
agcaaccgacagaaaagccggcagcaaggaaggagagagggcaaagaagaagcaaacacagaaaagccgaagcg

SEQ ID NO: 249265 - RNA, 75 nt, Homo sapiens
aaagaaacaaaaggcagaaccagcccggaggcaaagggaagccggaagagaaacagacacacgaaggaggaacca

SEQ ID NO: 249266 - RNA, 103 nt, Homo sapiens
cagggagccagacgacgaccccaagaaagggaaacaggagggaaaaacacaggagcaaggccaagcccaagcaaacaggagacgccgaagccagaagcacgaa

SEQ ID NO: 249267 - RNA, 74 nt, Homo sapiens
ggagcccaaaacaagaagcagggcggagacagaaaacccgaccaacgccccagcagcccaagagaaccaaggaa

SEQ ID NO: 249268 - RNA, 98 nt, Homo sapiens
gagaagggaagagggggccgccgaggagccccggccgcagccgggcccgagagggacaaacagcaggggccaagaaagaaggagagggggcgacagga

SEQ ID NO: 249269 - RNA, 54 nt, Homo sapiens
ccccggagaggccggggggccaggcccaccgccacgcgcccgaagacaacaaac

SEQ ID NO: 249270 - RNA, 87 nt, Homo sapiens
gacggagcagagccgcgggcgccggagccgaggcgagcgccgcgcgcaccacggagcacagcaagcgggagcaggcagaccaaagga

SEQ ID NO: 249271 - RNA, 79 nt, Homo sapiens
agaggcgcccgggacaggacccgcaggaccacgacggcgcggggaagggagaaggaggagcagaacacaggggacaggg

SEQ ID NO: 249272 - RNA, 58 nt, Homo sapiens
gaaaagacaaaggagaaaggaggggaggacaccggcaagggacagagacacgagacca

SEQ ID NO: 249273 - RNA, 78 nt, Homo sapiens
aggcagacaagccccagcgagggaccagagcgccgccccccccgacggacggcaacggacacaagaaccgggcacaca

SEQ ID NO: 249274 - RNA, 63 nt, Homo sapiens
gggaaccaaagagagcgcccagagaagaagagaacgcaaccccaggagccagcaagggcgcaa

SEQ ID NO: 249275 - RNA, 73 nt, Homo sapiens
ccgaagcgaaggaaacaacgaagcaaggaagccaagaacaagccggaaaggaaaaacaccagaacggaaacag

SEQ ID NO: 249276 - RNA, 81 nt, Homo sapiens
agagcgcggccaagaacagaggaagggcgcaaaccagcaaaagcagaaagcacggaccaaaccagcgaaaaggggagaaaa

SEQ ID NO: 249277 - RNA, 73 nt, Homo sapiens
ccaaccccccgagacacggggcacgccaccaccaaggggacaggcacccgcggccggaaaccaaccagaaagg

SEQ ID NO: 249278 - RNA, 62 nt, Homo sapiens
gaaacggcgcccgaagcggacagcccaggccaagacagcagccacgaggaaaaagaagggga

SEQ ID NO: 249279 - RNA, 80 nt, Homo sapiens
gggcagcggagcggcgagcgcgaaggcacgagcggagggagaacaagaacgcagggagggagcggcgggaccgggcgcag

SEQ ID NO: 249280 - RNA, 83 nt, Homo sapiens
gaaagccacggagcacccggcaaacagagacagacgaggagcgcagagcgcgagacgagaccgcaccccagcagccaggcccc

SEQ ID NO: 249281 - RNA, 75 nt, Homo sapiens
gcgggaacccgccgccagggaaaagcccggaaaagcagccaagcggaagacagagccgcaaagagacacgcagaa

SEQ ID NO: 249282 - RNA, 89 nt, Homo sapiens
aacaggaaggcgaaggaaaaaggaagacgagccaccgagcaagcgagccagagcccacagaagcaggaagccccgacgaagacccacag

SEQ ID NO: 249283 - RNA, 62 nt, Homo sapiens
gggcaagcacaagaccgcaacaagaccccgaaaaagagacggcaccgcacagccgccaaccc

SEQ ID NO: 249284 - RNA, 72 nt, Homo sapiens
caacaccccccgaacccagggacaaaaaagaaagagaaaaacagaggacagacaagacaagaccacacccgg

SEQ ID NO: 249285 - RNA, 64 nt, Homo sapiens
ggagagagggagagccaaagaagggcagcgacacccagacccaccggaccaggcccacccagaa

SEQ ID NO: 249286 - RNA, 74 nt, Homo sapiens
ggaaaaggaggaccaacaagcacaaagacagagggccgaggccaagccaggacggagggccagcaggcacgccc

SEQ ID NO: 249287 - RNA, 87 nt, Homo sapiens
gcacggaacagcgaggccagcaggagacggagccacggagcaggaaagggccgagaaagaagagaggaagaagaggaggaggaggaa

SEQ ID NO: 249288 - RNA, 71 nt, Homo sapiens
gaggaccgcggcgaagcaaaggaacgcgccggaagaaaaggcccgcccccccccaacacacgcgacacgaa

SEQ ID NO: 249289 - RNA, 54 nt, Homo sapiens
cccacaacccagccagccaccacagcaggacacacagcggaggagcggacaacc

SEQ ID NO: 249290 - RNA, 76 nt, Homo sapiens
aggggagccgcacaagagggggaaacggggaaaaggcaagcaggcgaagcgcgaaagaggcagaagaagggggaga

SEQ ID NO: 249291 - RNA, 87 nt, Homo sapiens
ccagaaacaggcacaggaccggacagccagagccccaaagcaacccccgaaagagccggggccgcgccacagagaccagcaagagaa

SEQ ID NO: 249292 - RNA, 76 nt, Homo sapiens
caggagcgggccccgccccccgccccccgccagagggagagcagggccacacaaaaggcccccgggaggccccacc

SEQ ID NO: 249293 - RNA, 77 nt, Homo sapiens
ccaggccgagcccagcgggacgggcggccccggaagcccccacgggccaccgacccgcagagcgggacaaagaagga

SEQ ID NO: 249294 - RNA, 53 nt, Homo sapiens
gccgaaacagaaaacaagagaccacagaaggaccaaagacgaccaccaaagcc

SEQ ID NO: 249295 - RNA, 84 nt, Homo sapiens
gaaaacgcacggagcgggcccgggccagaggcagaaaacggacggaagaaaaggcggccgagcccccgggaggaaaggaagaaa

SEQ ID NO: 249296 - RNA, 72 nt, Homo sapiens
gcaaagagcgccgagacgaggagaccccaaaaggcggaaagaaagaagagaaagaagccaaggaaagacagc

SEQ ID NO: 249297 - RNA, 36 nt, Homo sapiens
gcggagagcagcgcagcgggagaaagcagcccacag

SEQ ID NO: 249298 - RNA, 78 nt, Homo sapiens
agagcgcggccaagaacagaggaaggggccgcaggagggaagcgcacggaaaccgccccgggaggcacagagcaggag

SEQ ID NO: 249299 - RNA, 76 nt, Homo sapiens
cggagggcaccgaaggagaacgcggaaaacaagaagaagacacccggagccacggcacgaacccggagccacaagg

SEQ ID NO: 249300 - RNA, 68 nt, Homo sapiens
gcggagaggcgccccccgcagcaggcgaggaccggcccagccaggcccggggcagcggcgaccagagc

SEQ ID NO: 249301 - RNA, 72 nt, Homo sapiens
ccggaggaaacaggaacacccaagacaaaaaggcaaaacccacgacaagaaggcaccaacagggaagcggaa

SEQ ID NO: 249302 - RNA, 88 nt, Homo sapiens
cggccagaagagaccacgcacaggaggcccgaggagcggccacgcggagcgaagcagggcacagaccccagggggaacaggcgaagaa

SEQ ID NO: 249303 - RNA, 79 nt, Homo sapiens
ccagccaccaggccggggacccgcgcccggagaaggccccccggcggccagaggaggccccacagacaaaaccgccggc

SEQ ID NO: 249304 - RNA, 61 nt, Homo sapiens
aagcccaccacaaaaacgaaggcggcgggggcccgcaaaacggaggcgggggcacaggccc

SEQ ID NO: 249305 - RNA, 73 nt, Homo sapiens
gcaccgccaacccccgagcaagacgggccaagaggggacgccgcgcagcgcgagccccagccaacgagaagaa

SEQ ID NO: 249306 - RNA, 85 nt, Homo sapiens
gcgaaggaggaggacaaagagcccccacgagcccgcaagggcccgacccaggcaagcgagcaggcgagcaggagcccacagccga

SEQ ID NO: 249307 - RNA, 75 nt, Homo sapiens
ccggggccagcgcagccgcggcggagacgcacaggcccgacaaaacagaggagaccagaccagaagccccgaaaa

SEQ ID NO: 249308 - RNA, 74 nt, Homo sapiens
gagggggagccagagcaacaagcaccgcgagacaaacacaaaaacggcgcgaaagaggcagaggagaaaccagg

SEQ ID NO: 249309 - RNA, 64 nt, Homo sapiens
ccgccccgcaccggacccccccgccgcgggaggcagaaaaaaccagcaggccaggaacacaacc

SEQ ID NO: 249310 - RNA, 61 nt, Homo sapiens
ccacaccgccaccgacacagcggcggaccccacaccaaggaccggcgggagcccccccccc

SEQ ID NO: 249311 - RNA, 79 nt, Homo sapiens
ggccagcaccgaggaccccagcgcccaccaccgggccccccagccacggcgggcggcggacgaagggcaaagaccgggg

SEQ ID NO: 249312 - RNA, 79 nt, Homo sapiens
caaaagacagcgaggagcagcagcagcccagcaggcgcggcccgccagcaccaccacccacccggaacaccgcgaaagc

SEQ ID NO: 249313 - RNA, 59 nt, Homo sapiens
ggaacgcgaggccagggacgcagcccgccggaagggaagcagaggaaccagacccacag

SEQ ID NO: 249314 - RNA, 42 nt, Homo sapiens
aggaaaggccagaccacagaaggacccaaacccccgagcccg

SEQ ID NO: 249315 - RNA, 65 nt, Homo sapiens
gcgagcagcacagagacggcgaaagcgagcaggaacccggaagaggaaagaaggaccaggaaggg

SEQ ID NO: 249316 - RNA, 39 nt, Homo sapiens
gaaaacaagagaccacagaagaggcgcccgcccaggagg

SEQ ID NO: 249317 - RNA, 79 nt, Homo sapiens
aggaagggggcaagaagagccagggccgggaggacaccagaagcaggggcaaaagaaaagggccgcggagacaagagaa

SEQ ID NO: 249318 - RNA, 60 nt, Homo sapiens
gggaggggccaaccagcaccggagggacgcgcagaaggagcgcgccccgagagggcagga

SEQ ID NO: 249319 - RNA, 67 nt, Homo sapiens
cagccacaacaccggcaggaaccaccaggacagagggagaagcagaccgcaccaggcgggaccccga

SEQ ID NO: 249320 - RNA, 76 nt, Homo sapiens
cgcgccggagcggagcgcgggcgccggggagccaggcagacgccaaagagaaacacagagaggccggcacggagca

SEQ ID NO: 249321 - RNA, 61 nt, Homo sapiens
acagggaggagcggagaacgcaggaaccggcccacagcgcaccgggggggaccccagcaga

SEQ ID NO: 249322 - RNA, 75 nt, Homo sapiens
accggagcgcagcagcgcgcgacccggcccaaccccgagccgcgggcacagacagccgaggaagcaagcagcaac

SEQ ID NO: 249323 - RNA, 79 nt, Homo sapiens
gaacccgcggcaaccgcccgaccagccgccccagccgccaggacccaacgcccgcgccgccgggagggagcggcgggac

SEQ ID NO: 249324 - RNA, 73 nt, Homo sapiens
acacaaaaagagagacagaaaagaggacccagagagggaccagggccaaagaagagccggggggcaggcggac

SEQ ID NO: 249325 - RNA, 80 nt, Homo sapiens
caagagagccgcagccgccagggacgggggccaccggacagaggaccacccgcacccaggggacgcacggcccaaccccg

SEQ ID NO: 249326 - RNA, 71 nt, Homo sapiens
ccccgcgcgagaccgcccagaggggcccaccgcgcccgacaggagagacaacggaggcaagaaagacggag

SEQ ID NO: 249327 - RNA, 85 nt, Homo sapiens
ggacgaaccccacgcgggcgcggacgaccggagcagagagcggcgagcaaggacagagcgggagccaccagcgccaaagggaagc

SEQ ID NO: 249328 - RNA, 68 nt, Homo sapiens
ggccacgggccgggcgcggcaccacgcccgccccagcggagagaggaaaggcaagggcagaaaagagg

SEQ ID NO: 249329 - RNA, 66 nt, Homo sapiens
cagcccggaggcaaagggaagccggaagcagacacaggacaaccagaagaacaaaaccgagacaga

SEQ ID NO: 249330 - RNA, 75 nt, Homo sapiens
ggcgacacagcaacacggccgaaaccccaagcaccaccaccaccccggaaaccaggaaaagggggccaggaagca

SEQ ID NO: 249331 - RNA, 86 nt, Homo sapiens
aggcgccaggacaccgcaagaaggcgaacacaaggagacgacggccgcaaggaggagaacggacccacagacaaacacagagaagc

SEQ ID NO: 249332 - RNA, 75 nt, Homo sapiens
agcccccagagcgagacacagcacccagccgccgaaaccaaagcagcgcagggaccccagcccagagcacacggc

SEQ ID NO: 249333 - RNA, 74 nt, Homo sapiens
cccgaggaagcaaggccgcggggggagaccccaccaccggaagaaagggcaggcgagagagggggaacaggacc

SEQ ID NO: 249334 - RNA, 65 nt, Homo sapiens
cgagccaggcaggagcgagacgggaacagaccccgcaaagggcaaaagagacggacaagcaaggc

SEQ ID NO: 249335 - RNA, 68 nt, Homo sapiens
ccccccggaccggggaccgcgcaacgacaagcaaggcgccaccggaagaaacgggaggggaggagccg

SEQ ID NO: 249336 - RNA, 69 nt, Homo sapiens
cccaggagaagagccagagcgggaggacgacgagagagacagaggcacaaaaggagaaagcagaagaaa

SEQ ID NO: 249337 - RNA, 74 nt, Homo sapiens
aaaaaagacgaacaagacacggcacccgaaaggagaccgggaagcagaagcacaacagcaaggaacaccacagg

SEQ ID NO: 249338 - RNA, 79 nt, Homo sapiens
gcgggcccgcgcgccgagggcgaggcggacgcgcggcgcgcagcaacccacgacggagacaccacgccacaccgcgcca

SEQ ID NO: 249339 - RNA, 83 nt, Homo sapiens
aaaacccggaagagcgccccaggagaaacaagacaaccagggaagcagaaggcaaggaccccggcaaggagaaacaacagcag

SEQ ID NO: 249340 - RNA, 76 nt, Homo sapiens
gacaagaagggcaaagccgaaggcagcggaacgcgccgacgccgcaaccagcaccccgaggagcggaaccagaccg

SEQ ID NO: 249341 - RNA, 82 nt, Homo sapiens
cggcgggcaagcgcgggccgcggaggaggccaggcaccaagccaggagaagggagacgggcaagaccacgccccacacgcaa

SEQ ID NO: 249342 - RNA, 68 nt, Homo sapiens
ggaaagaaggaccagcagaagaaagaaccagcagcggcaaaggaccagaaagggcgggaaccagcgag

SEQ ID NO: 249343 - RNA, 70 nt, Homo sapiens
gacacggcacgccacacccggcccgcagaaaaaccggcaggcacaacaaaaagggccgcagacccaaaac

SEQ ID NO: 249344 - RNA, 69 nt, Homo sapiens
cgggacgcgaagcaacaggccccgcgggaaaaagccaccccgaacagcgcagacaacacccgcgagccc

SEQ ID NO: 249345 - RNA, 84 nt, Homo sapiens
cccggcgccgccccaccccggaacccgcggggcggaccggagaagccccgagcaccccacagagaccccaggcaggaggagagc

SEQ ID NO: 249346 - RNA, 71 nt, Homo sapiens
caagccaggcacccaaaaaaacagagccaccaaagaagaccagacaggggaaggagagacagagagggaag

SEQ ID NO: 249347 - RNA, 78 nt, Homo sapiens
aagaccgccccgccgcccagaggacgcccaacaccacccacccaccacgggcacccggcgcgcacacaaagaaccgca

SEQ ID NO: 249348 - RNA, 58 nt, Homo sapiens
agaaagaaggaagcggcgccgaaaaaaaggggacacaggcaaaacggacaaagaccgc

SEQ ID NO: 249349 - RNA, 81 nt, Homo sapiens
cgccgcgcacagagcaaaagaacgcgcgaggaggcaggagaagaaagccgacaaaacagaggagaccagaccagaagcccc

SEQ ID NO: 249350 - RNA, 69 nt, Homo sapiens
ccaacccacggaggaaggggcccggcacaaggaaaggcagggcagcgcaagccacaggaacgagccacg

SEQ ID NO: 249351 - RNA, 110 nt, Homo sapiens
ggagcgagacgaagcgcccggggggcgagcccgccgcacccgggccgcgccggcacgggagaaccgccagcgacgggaaggcaggacccacgcacgagcaacgagaagag

SEQ ID NO: 249352 - RNA, 91 nt, Homo sapiens
aaagggccggaaggaaagaagaagaggcccgcaagagcagcagcagagaaacgagcagaacaaaaaggggacaagagacccaaacagaaaa

SEQ ID NO: 249353 - RNA, 55 nt, Homo sapiens
cggccccgaaaggcggaaacaggcgggcaaaacgccgagcccgagaacgacccca

SEQ ID NO: 249354 - RNA, 86 nt, Homo sapiens
cgccgccagcggcgcaggcccagagcgcgcgagcggaccaggagggcacccccgggacggcgaggacgacgggcagacgccagcca

SEQ ID NO: 249355 - RNA, 58 nt, Homo sapiens
gaacgaggcccccaccaaaaccaagcacgacagccaccaggaaggagagagcacgacc

SEQ ID NO: 249356 - RNA, 80 nt, Homo sapiens
caagcgaggcccccgggacggccaaggagaacgcgccgccggccggggcgcagggacacggggggccaagggaccacacg

SEQ ID NO: 249357 - RNA, 88 nt, Homo sapiens
aggaggagaagcccagcgacaacggaagggcaccgaagaggcaccccaccgaaaaacagcaggccgcggcagagccaaccaccggccc

SEQ ID NO: 249358 - RNA, 79 nt, Homo sapiens
agaccggaggaggcgggggcgccggcagaggaccaggcaccaccggccccggaaggagacgaccccagcaaagcgaccg

SEQ ID NO: 249359 - RNA, 66 nt, Homo sapiens
ggggaggccgaaggggcaggaggagaaggcaaagagccagcccggcgccacaggagccgcagaagc

SEQ ID NO: 249360 - RNA, 54 nt, Homo sapiens
cgaaaacggaaacacaagagaccagagaagcgcaaccggccaaaccccacggcg

SEQ ID NO: 249361 - RNA, 78 nt, Homo sapiens
gaggagcgccggaacgccgaggcccaggaggcagaaagcggaaggcaggaaggcgagcgagaaggccagagccgcggc

SEQ ID NO: 249362 - RNA, 72 nt, Homo sapiens
gccgcagaagagcggccggagcgaggggcggaccgcgggcgcccacgaccagaacagagagaagggcgggag

SEQ ID NO: 249363 - RNA, 58 nt, Homo sapiens
gagacccaaggaaagacagaggacccgagccccaaagacagaaaagccccgagacgga

SEQ ID NO: 249364 - RNA, 94 nt, Homo sapiens
agcagcacaaggaagcgccccaaagagcggccacccccagggcccacaaaaaagcgcgaagcagcgacccaagcgcgccggcgcgggccccaag

SEQ ID NO: 249365 - RNA, 64 nt, Homo sapiens
cacaggccacgagaacggcccgagaccggcacgagcaggaacgcacacgggcacacaccacgag

SEQ ID NO: 249366 - RNA, 69 nt, Homo sapiens
cgaaagccaggccagaaaacagcaggcacaacaccgggaaaagccgcccccagacagcgcccgaaagca

SEQ ID NO: 249367 - RNA, 81 nt, Homo sapiens
aaacccccggcgcccggcacgggccggagacggcagggcacgggccccaggccgggggccccgaaggcaaagacacgcacc

SEQ ID NO: 249368 - RNA, 67 nt, Homo sapiens
cggacagagggaggaggcagggaccagcggaacgaggccgcgaaaggggaggcgaagcggccacagg

SEQ ID NO: 249369 - RNA, 64 nt, Homo sapiens
gaccggcccgcagcaagaggcggacgagaaggacagggaagacagcggccacagaccggggcgc

SEQ ID NO: 249370 - RNA, 83 nt, Homo sapiens
agcggagccggcaggaaggggaccgggcggcggagcggcggaagaaggaccaacaacacaacgaaaaagcacgggagggagcc

SEQ ID NO: 249371 - RNA, 89 nt, Homo sapiens
cccagggaagcgcagaaagcaggcgaacccgcggcgcaaaacgaccccagaaagagcaacagaaggagacagagcacggaaggacaaaa

SEQ ID NO: 249372 - RNA, 59 nt, Homo sapiens
caaggcaccgggacgcgcacccccgcgccgcacggggacgagggggcacccgaggagga

SEQ ID NO: 249373 - RNA, 77 nt, Homo sapiens
ccggaagagcgcggccgaagaagcccacccagagagagaagaacaaggcggccaaaccaagaccaacaaccacccag

SEQ ID NO: 249374 - RNA, 58 nt, Homo sapiens
aggaacggacggagcggacacgaaacgggacgaacagcggggacgccccagcagaccg

SEQ ID NO: 249375 - RNA, 71 nt, Homo sapiens
agcacccggccgagacggcggcagcagcggcacagaaggccaggcaggacgacgcggagcagggacacgca

SEQ ID NO: 249376 - RNA, 75 nt, Homo sapiens
ccccaagaaccggccaccggccccacacgaccggaccagcgcgacgaggaggcgcgcacacagcccagcccaggg

SEQ ID NO: 249377 - RNA, 60 nt, Homo sapiens
aggcagcgcacgacagcaaaaggcccgggaggagcggggacacgaggaccccccaaaggc

SEQ ID NO: 249378 - RNA, 53 nt, Homo sapiens
ccggcgcccaaggagaggccaaaggcaaaccgacaccagcgacacaagcgcga

SEQ ID NO: 249379 - RNA, 52 nt, Homo sapiens
gcgagggcagggcacaaccgacagagggcaaacgcagaagaagagggggaga

SEQ ID NO: 249380 - RNA, 78 nt, Homo sapiens
gaagaccccggcgcgggaacggaggcaagcgccaggaccgcggggggcgagccgccgcgccccaggccgcagccccgc

SEQ ID NO: 249381 - RNA, 83 nt, Homo sapiens
gagcgaaaggcagacgaccggagacgaggggggagaaccagccgacggagcaggcagcagcccaggacacaaaccggcacgaa

SEQ ID NO: 249382 - RNA, 81 nt, Homo sapiens
gcgggcggcagcagcggggcggggcgaagaagcagcacaaggcgagccagcgaaggagccaagagaccaaccaaggaaacc

SEQ ID NO: 249383 - RNA, 83 nt, Homo sapiens
gggaaaggagacacagagaaaggaacagacagccggggaaggagcaagacgagaacaacgacaaaagaaggggcggggcagga

SEQ ID NO: 249384 - RNA, 49 nt, Homo sapiens
cggggcgaggcacgccccgccgccaggacagggcagaccgccagcagca

SEQ ID NO: 249385 - RNA, 78 nt, Homo sapiens
ccaggcgccgcccgacccaaccggcggccgagcgcgagcaagcaaagggaaagcaaggaaacagggcagaagccagac

SEQ ID NO: 249386 - RNA, 84 nt, Homo sapiens
agagagcccgggaccgccaggccaccaccggccgcccagccaggacgcgcccggagaaggcagggaggggaggaagaagcggga

SEQ ID NO: 249387 - RNA, 62 nt, Homo sapiens
ggcggccccggagagagagccgcgcacgcacagacaagcggacgggcagccggggcagaccc

SEQ ID NO: 249388 - RNA, 64 nt, Homo sapiens
gacccagccccagaaaaccggggaccacgggaaagcccccgcagccggcagacaaagacagcgc

SEQ ID NO: 249389 - RNA, 70 nt, Homo sapiens
gggcccaagggccccccgggaacgcagcgcgcaggaccacggggaaagccaagaagagacagggcaccgg

SEQ ID NO: 249390 - RNA, 76 nt, Homo sapiens
accgaggagagacacggaccaccacgcccggaagggaaaggcaacagcaagagaaaagcccacagaagaggggccg

SEQ ID NO: 249391 - RNA, 91 nt, Homo sapiens
caggagggcaggcgaggggcagagccggagagcagccccggcccccgagcagaacgacgccgcggccggaagagggcgccggggcggaccc

SEQ ID NO: 249392 - RNA, 72 nt, Homo sapiens
cccacccaccaccgcccgagaacacgaaacaaggaagaaagaagcaagaaaaacagaccgggggaaaaagcc

SEQ ID NO: 249393 - RNA, 79 nt, Homo sapiens
agcagcaggcacagcacgggcagagccagagccccccccagcgccgaaggcccgacccagcagcccggcccggcaccgc

SEQ ID NO: 249394 - RNA, 89 nt, Homo sapiens
ccagaccccgcgcggggcgccggcccaggcgaccgggccggggagccggcaggacccgaagacgaggagacaagcgcaagcagccagag

SEQ ID NO: 249395 - RNA, 72 nt, Homo sapiens
gaccagaaacaagcagaagagagcgcgagcagaaccgagaagcgccccagaaagagcgcccaaaggacgcgg

SEQ ID NO: 249396 - RNA, 79 nt, Homo sapiens
gaaaagccaagcaaacaacgaggccaagcccgaaggaccagagcaaggaggacggaagacgcagacagcacaggaaaga

SEQ ID NO: 249397 - RNA, 118 nt, Homo sapiens
cgaccggcggggcccagggagaaaggcccaccggccgggagggcccagggcggggcccgagacaacaggcacaaagagagaaggaacacccacagggcagacagagaaagaacacaaa

SEQ ID NO: 249398 - RNA, 74 nt, Homo sapiens
agggggcgggagagagacaccaccccaagaggagaagcagcaagaggaagagagaaggccacgcccgaccccaa

SEQ ID NO: 249399 - RNA, 93 nt, Homo sapiens
gcaaggacccgcccagcccccaagagcgggaacaggagcggcgacagcccaaagagaagagaccgagcaaaaaggaagaacccgaagaggagg

SEQ ID NO: 249400 - RNA, 92 nt, Homo sapiens
gcgcccccgccacgcagccggccaccgccgagacccagcacacgccgaccaggcagaagccccagaggagcccgaaacccccaggcgggcag

SEQ ID NO: 249401 - RNA, 89 nt, Homo sapiens
cgccccagcaggacaaacgcacccggcgaagacggccgaagcccgcagcccacgcacagccggagagcagccgagcacggggccaccag

SEQ ID NO: 249402 - RNA, 77 nt, Homo sapiens
gcaacgggcccacccggaaggaaggcccagcgccaaacgacaaagcccggcgcagaggagccaggaagagacaagca

SEQ ID NO: 249403 - RNA, 66 nt, Homo sapiens
cgaagggaggaaaagggcagggacagcgcaggcagcaggcagccaaacccaggcccaacacaggac

SEQ ID NO: 249404 - RNA, 51 nt, Homo sapiens
gcagccaccgaaaaggcaaaaagagcagcgcgaccggccccccgcggaacc

SEQ ID NO: 249405 - RNA, 82 nt, Homo sapiens
gaaagccaacaaaaggaaggaggaaggacgggaagcggcaaccggagggagccacaccaaagccggacccccccagccggac

SEQ ID NO: 249406 - RNA, 71 nt, Homo sapiens
cccgccggccggccgagggcacagagccaacgaaagcaaaggcacacggaggaaaaccgaacaaacgacca

SEQ ID NO: 249407 - RNA, 75 nt, Homo sapiens
caacgcacaagaacgaaaccggaaccagacagaaggacacaaccagagggaagcacgcccgggcacagcggaaga

SEQ ID NO: 249408 - RNA, 68 nt, Homo sapiens
gcccgaggcacgagcaacaacggagaaaagaagacgacacaggcaggaagaaacccgcgccgagcgcc

SEQ ID NO: 249409 - RNA, 83 nt, Homo sapiens
acgccgacacgccccagcaccgcccagacaaggccgggccaaccgaacaagaagagcagagcaaccccaacacacgaaaaaaa

SEQ ID NO: 249410 - RNA, 54 nt, Homo sapiens
aaacagacacagcagcagggcaagaaaggagagagccgggcagacccgaaaagc

SEQ ID NO: 249411 - RNA, 111 nt, Homo sapiens
cagacgggccaagagcagaccgggcgaagggagaggacagcagggaggcgggacgcgggaccaaccggagagacaccgacacaaaggccgcagacaggaaaaagaggagga

SEQ ID NO: 249412 - RNA, 51 nt, Homo sapiens
aaccccaggaaccagagcgcaagccccggggcagagacacaggacacccac

SEQ ID NO: 249413 - RNA, 81 nt, Homo sapiens
gcaagaaagagaagaagacaggaaaaaaaaaacaccgagagcgccaagaacaggagcaacacccaggacagaagggcaacc

SEQ ID NO: 249414 - RNA, 49 nt, Homo sapiens
ggggaaacaccaaacccaccccgagggggcagaacccaagccagacacg

SEQ ID NO: 249415 - RNA, 78 nt, Homo sapiens
gaagacccgggagagagaaaaaccggacgagcgagcaagggcagcggaacgcgccgacgccgcaaccagcaccccgag

SEQ ID NO: 249416 - RNA, 75 nt, Homo sapiens
gcggaccagggacccgcgaaagcggggcacaggcgggcacgcgcccagccacagggccagacaaccacgccgggc

SEQ ID NO: 249417 - RNA, 67 nt, Homo sapiens
gggggagcccagaggagacagaggagccaggaagagacaagcaacgaggaaaagaaacaaaacacgg

SEQ ID NO: 249418 - RNA, 59 nt, Homo sapiens
gcggggagagacggccaagcagcaccagcggccggggaaaggggcggggccggggagcc

SEQ ID NO: 249419 - RNA, 77 nt, Homo sapiens
ccagggcacgaggagggcgggcacaggaacggcgaagaggaacagaggaaacgcgggagaacagccggccaccgaag

SEQ ID NO: 249420 - RNA, 36 nt, Homo sapiens
aacacagaacccaagaaggagcaccgccggccagga

SEQ ID NO: 249421 - RNA, 71 nt, Homo sapiens
caaccagaacggaacgaaagcccccaaccgcggcagcagcagcaaagaacacaccaagagacagaaaccaa

SEQ ID NO: 249422 - RNA, 70 nt, Homo sapiens
gaccgaaaaaaaaccgcaaaaccagcaagagagccccccagaagcaggaaaacggcaaagcagaaggcga

SEQ ID NO: 249423 - RNA, 70 nt, Homo sapiens
gagaaacaagaggaggagggcaacagccaaccagaaaaccagaaacaccggcagggagcaaaccccccaa

SEQ ID NO: 249424 - RNA, 34 nt, Homo sapiens
aggggcaggaaacgaagcgaacccagaagaggaa

SEQ ID NO: 249425 - RNA, 86 nt, Homo sapiens
gcgcccgcgcgccgcggaaccccgggcccccgacgcagcccagcggcacggagaaaggccaggcgaaccagccgaaaaaggagaaa

SEQ ID NO: 249426 - RNA, 68 nt, Homo sapiens
cggagcagaaggccggggaagaaggacacaggagaaccaacggggcagagggaaacgccaagcgcggg

SEQ ID NO: 249427 - RNA, 79 nt, Homo sapiens
cacaggggccaggcccgcggggggggggcggcccaccgggaccgccgggcacaagggcaggcaaaacaaagggaaagcc

SEQ ID NO: 249428 - RNA, 76 nt, Homo sapiens
gcacaggggcccgaaggccgcaggcagcccggggaggagcggagagcaacccccagccacaacgcgaaccgggcgg

SEQ ID NO: 249429 - RNA, 77 nt, Homo sapiens
cggccaccgcaggcacaggccgaacagccaaccccgagagccggcccaccggcgggcgcgccggccgcgccaccccg

SEQ ID NO: 249430 - RNA, 72 nt, Homo sapiens
agaaggcgcccacaagggacacgagcgggaagcaggcggcaaccacccgcacggagagacacaaaagcacca

SEQ ID NO: 249431 - RNA, 78 nt, Homo sapiens
ccggcgcgccacagcggggccgcggacgcaaacagcagacggaagaccccacggcaaaaccacacccgaggcgagccc

SEQ ID NO: 249432 - RNA, 55 nt, Homo sapiens
ccacgggagaaagaggcacaggggaccaggcggagccccgaagagcggcaggaaa

SEQ ID NO: 249433 - RNA, 52 nt, Homo sapiens
gaccaagaaccagggcgcgcccgaggcgccagcagaaaccaccccgcagcag

SEQ ID NO: 249434 - RNA, 71 nt, Homo sapiens
gagaacgcgcgacagggaaaagacggaaagaccaacggagacaaaacagccacacgagacgacggagaggg

SEQ ID NO: 249435 - RNA, 69 nt, Homo sapiens
aaaagagaaagagcgcgcgaagcccccgaagaggccagcggaaacggagggaaagaagaagaggaggga

SEQ ID NO: 249436 - RNA, 80 nt, Homo sapiens
gccgccccgagcagcccgccaggcccaaaagcagccagacaccacagcgcaaggaggaacggcccacgaagcggagaagg

SEQ ID NO: 249437 - RNA, 72 nt, Homo sapiens
ccggggacgggagcgagcgggaggcccagacgaggggacaacgaaggaggcaagcaacaaagggacaaaaac

SEQ ID NO: 249438 - RNA, 71 nt, Homo sapiens
gcagaaaaaaaaaagaacagcccaccgggaacagccacaagggagcccacggccccgcaacagcccagagc

SEQ ID NO: 249439 - RNA, 84 nt, Homo sapiens
aagaggacagcgggaagcgaaagaacgcagaggcccacagcaagggggcagacccaaaggaaacgcacgaaagaaacaggagag

SEQ ID NO: 249440 - RNA, 52 nt, Homo sapiens
ggacggcccacgagacccaccggaacagcgcaagccccggggcagagacaca

SEQ ID NO: 249441 - RNA, 78 nt, Homo sapiens
caccaccaccggccccgaaaagggagcgagcgcccgagaaagaggccggacaaccaccagcagggacaacaacgcagg

SEQ ID NO: 249442 - RNA, 57 nt, Homo sapiens
cgcgcgcccggcggcgcgggccaagcagggaggggccagaaccacaaaaagagggga

SEQ ID NO: 249443 - RNA, 68 nt, Homo sapiens
agacagaccaacaggaagccgccagacaaaagggacgggcccggccccgggcccgcacggcccaccac

SEQ ID NO: 249444 - RNA, 72 nt, Homo sapiens
cagggagcggcgcagaccgagacccggacagggcaggaaacagcgggccgccgcccggcgaaaagggggccc

SEQ ID NO: 249445 - RNA, 101 nt, Homo sapiens
ccgccccccgccaaggcgacccccaccgagacgaagcgggcggcgaaggaggaagcccgacagaaaagggaaggagccgagacggaagcacgcaacaggac

SEQ ID NO: 249446 - RNA, 83 nt, Homo sapiens
cgcaggccgccccagcgccgcgggagagcgcgggggaccgcggcccccagcagagcccgccgcccggcgaaacccagacccca

SEQ ID NO: 249447 - RNA, 96 nt, Homo sapiens
cgcccgcaggcccggcccgcccggacagagcccgggcgcgcagagcccaaaaggcagagcgaggagagaagaaggagggaaagccaaacaacggac

SEQ ID NO: 249448 - RNA, 93 nt, Homo sapiens
cagagagaagcacggagggagcgggccaaggaggaggcagagggcagacgagagggaagcggccaaagccagcagaacaacgccaagcccgag

SEQ ID NO: 249449 - RNA, 75 nt, Homo sapiens
aaaagcacccggaggaggaagaagaaggaagccaaagaaggcaggagaggccaaagagaagccaccgaaacgagg

SEQ ID NO: 249450 - RNA, 61 nt, Homo sapiens
cagacgggagccgggagccggcagggggccaaagggcgagggcacaaaaaaccacaccccc

SEQ ID NO: 249451 - RNA, 49 nt, Homo sapiens
acaaaagggccaaagaagggagagagggggccacggagaaccagcgcag

SEQ ID NO: 249452 - RNA, 76 nt, Homo sapiens
aagaaggaaccgagcaacgcggccccagccgcggagacacaacaacagaggcagcaacgacacggagaaagaaaga

SEQ ID NO: 249453 - RNA, 76 nt, Homo sapiens
gagaggggcaggcggcaaaccgaagcagacaagaaccacgcgaaaaaaggaagagaacccaacacaggaaaggagg

SEQ ID NO: 249454 - RNA, 82 nt, Homo sapiens
ccaggaggcccaagacaccacagaagcccccgagcccaggccaggccgcccagcacgccacaacgagaaaacaaagccaaga

SEQ ID NO: 249455 - RNA, 84 nt, Homo sapiens
cgcgagcggagcagcgcgccacggcaaccaaaagcgcaagcccagcccgcgcgccagacacacagaaggcaaaaagagagcacc

SEQ ID NO: 249456 - RNA, 83 nt, Homo sapiens
cgaagagcgaccgccgacccccgaggaagagcagacggcaggacccagaagaccccaccccaccccgcccggaggacaacgga

SEQ ID NO: 249457 - RNA, 113 nt, Homo sapiens
cgaacagacagaccaagcgccaagccaaagagaggggagaaagacgaaagcgcccagaacccgcagcagagcaggaagcgaagaagccacaaagaggccagcaagagaaaaga

SEQ ID NO: 249458 - RNA, 94 nt, Homo sapiens
ggcaagagaggcaccccgaagaggcgaggagcaacccagaaagaccacagcaagaccacgcccccagccgggggaccaggccgaacgacccgga

SEQ ID NO: 249459 - RNA, 67 nt, Homo sapiens
cgcgcgcccgccgcaccgcagggaaggaccacccccgaaaagcagaagaacgaacaagaacacacag

SEQ ID NO: 249460 - RNA, 74 nt, Homo sapiens
gaccaacgcaacccaagagaggacggggacgggccccaggacgaggaagacaaggccagccacggaaggagaca

SEQ ID NO: 249461 - RNA, 71 nt, Homo sapiens
aacgcagccgagcagccaccggagcagaggaggacacagggcggaaaaacaaacgagccaccagcgcccac

SEQ ID NO: 249462 - RNA, 64 nt, Homo sapiens
agcccccacaccgagggacgagggagagcgggggggcccgcagaagcccagcagaccagcaagc

SEQ ID NO: 249463 - RNA, 79 nt, Homo sapiens
gccggaacggcggaccgggacgcacgccagcgaggaggacccccaaaggcaccggcccgaccagccacgacacccacga

SEQ ID NO: 249464 - RNA, 60 nt, Homo sapiens
cgagccggggaggaccgcgcagcgagggcagaaagggcccagccggcagagggaccggag

SEQ ID NO: 249465 - RNA, 58 nt, Homo sapiens
ggaaagaagggggcagaagagggacccgggcccaaagccgaaggcaagggaaggaaga

SEQ ID NO: 249466 - RNA, 51 nt, Homo sapiens
gccgagaggagcaagcgagccgggacaaaccagccagcagagcacaccagg

SEQ ID NO: 249467 - RNA, 60 nt, Homo sapiens
gagcaagagcaagacaccggacaccgagggcccccaaaagggaagcgccaaagaagcgac

SEQ ID NO: 249468 - RNA, 41 nt, Homo sapiens
gacaaaaagaccagcagcaacagaggccgggaagaaggagg

SEQ ID NO: 249469 - RNA, 83 nt, Homo sapiens
ccccacagaggggcgacgggcaggagaagagaagggggacagcaggaccacacggggacacagggagccaccccgggcgcaga

SEQ ID NO: 249470 - RNA, 87 nt, Homo sapiens
gggccacaagaccagaagaccggcgggacagcagcaaagaaggccgagggacgaggaccggaggagccgccacgcccgaccggacac

SEQ ID NO: 249471 - RNA, 76 nt, Homo sapiens
ggacacccggaagagaagccgaaagcaggggaaaggaaggagaacggaaaaagcccagaaaacgcacaaaaaaaag

SEQ ID NO: 249472 - RNA, 36 nt, Homo sapiens
cccggacggcacagggggcggaagggcaagaaagaa

SEQ ID NO: 249473 - RNA, 61 nt, Homo sapiens
aacacagaaaccggccccagcccaagacacagccccagcagcccccagacccacagacaca

SEQ ID NO: 249474 - RNA, 79 nt, Homo sapiens
gacacggccgccgggccgcgcccacgggcagcgaggacgcaggcccaagaccgagccaccgcacgggcagcagaacgag

SEQ ID NO: 249475 - RNA, 81 nt, Homo sapiens
gagccagacagccccggaagccgcgccgccgccgccagggcggagaacggaaaagcaccaggaagcagagaggaccgcaga

SEQ ID NO: 249476 - RNA, 54 nt, Homo sapiens
aaaccgagccgagacaaaacccaggagaaagcacggaaaaaaaacccaaagaga

SEQ ID NO: 249477 - RNA, 55 nt, Homo sapiens
aacagccgagaagaaaccgcagcagggaacagaaagaggcagcagacgacaggac

SEQ ID NO: 249478 - RNA, 63 nt, Homo sapiens
gaagaacaaagaccggaccaaaccggacagaagagcagaagacagagaaggaaaagaaaggaa

SEQ ID NO: 249479 - RNA, 78 nt, Homo sapiens
gagagggccggagacacccgagacacacaccaccgccacacgcgcagcaccgggagcccagaggcggggaaaaaggag

SEQ ID NO: 249480 - RNA, 86 nt, Homo sapiens
ggacacgggagaaagggagccgagcgagaccacgcaccacgggcgacaaaacaccggggcccacaggacagccgggcgcacacaac

SEQ ID NO: 249481 - RNA, 68 nt, Homo sapiens
ggaacaacgcacccaccagcaaagaaagggaagcagcgggagaggagggggacagccaaagagacggc

SEQ ID NO: 249482 - RNA, 77 nt, Homo sapiens
ccggccccgcacgccgcaaccccagcgccaggcgaggcggacgcgcccaggcgagggaccagcaggaggcaaacaga

SEQ ID NO: 249483 - RNA, 60 nt, Homo sapiens
cccaggccgcacggacgggggggggggcagcccggaacccgaggagggaccgggagcggc

SEQ ID NO: 249484 - RNA, 76 nt, Homo sapiens
gcccccggcggaaacagcagggccccaagcagagggcagagggagcccagcccaagccaagaacgacgcaacacac

SEQ ID NO: 249485 - RNA, 86 nt, Homo sapiens
ggcgcgcggacccaggcgcggaggcgaggccagcagcaccagggaacaggaaacaagcgaagggaagaagcagacagcccacagac

SEQ ID NO: 249486 - RNA, 72 nt, Homo sapiens
aaaccaaagagccggggacaagggcgccgagcggaagaaccccagccacaaagaggaaaaacgcccccacag

SEQ ID NO: 249487 - RNA, 75 nt, Homo sapiens
cccagcgcggcaagggacacagagaccaacacggggccagcaaacaaagccagggggaggggggcgaaaccgagc

SEQ ID NO: 249488 - RNA, 74 nt, Homo sapiens
gcccgagacccgcaagacccgggaaggaaagaccacagcaagaccacgcccccagccgggggaccaggccgaac

SEQ ID NO: 249489 - RNA, 75 nt, Homo sapiens
gaccaaccgggggccaagaggagacgacacgcaccaagccagaacagccgaggcacgcaagccaaaaagacagac

SEQ ID NO: 249490 - RNA, 83 nt, Homo sapiens
gcgggcggccccgacggggcgcgcgcgaagcgagcgagaaggcacggagcgccgcggagcgcagggaccaggcagacgaccaa

SEQ ID NO: 249491 - RNA, 76 nt, Homo sapiens
ccaaggcccgcgggcgggagaacggaaaaccccaacccggagggagccggaaacaaagaagaggagaaaaagccaa

SEQ ID NO: 249492 - RNA, 84 nt, Homo sapiens
cgccaggcggccgcaggcgggcggagagccagccaagaaaagggccaaggaggagacacaaaacagaaaaagacaagcaaggcg

SEQ ID NO: 249493 - RNA, 76 nt, Homo sapiens
agagggcaagaaacccaaccccaagacaccaagagcaagccaaccaaaaccaagaagggcaggcaggaccaaggca

SEQ ID NO: 249494 - RNA, 88 nt, Homo sapiens
ggccaagaacagaggaagggaccaaaagccccaacagcggcaagaccagcacacagaggccagagcacccagcgcagcagcgggccca

SEQ ID NO: 249495 - RNA, 83 nt, Homo sapiens
ggcacgggagacacacccgcacacgccagcgaagcagagccgcagagcacacaacagaccgaaggggacagcggacgacgaag

SEQ ID NO: 249496 - RNA, 82 nt, Homo sapiens
gcccggcaccgcgccgcccagaggccacccagccccagacaggacggcggccccggaccagggcgaaagaggccaagaggac

SEQ ID NO: 249497 - RNA, 71 nt, Homo sapiens
aggggaggcagcagcaccaaacaggggacaaggaaggccggaaaggaaaaacaccagaacggaaacagaag

SEQ ID NO: 249498 - RNA, 75 nt, Homo sapiens
gaggcacagagaaccgaccagaacgcagcaacaaagggcggagaacggaaaagcaccaggaagcagagaggaccg

SEQ ID NO: 249499 - RNA, 65 nt, Homo sapiens
ggaaaaagcagggaggagaggcaaaaagaagcacacaaaagagggacaacacaagccacagcgcc

SEQ ID NO: 249500 - RNA, 108 nt, Homo sapiens
gaagaaaaaggaaaagggcccgagcagagagcaccagccaaaggaaaaaaggcgggagggcccccaagacccaacagagggagccgcaaagaacaccagcaaggaaaa

SEQ ID NO: 249501 - RNA, 67 nt, Homo sapiens
gagggggacacccgggcggggcagagcagcccccagccagccgcgagccccaaaagcacgcacgaaa

SEQ ID NO: 249502 - RNA, 73 nt, Homo sapiens
acgcaacggacaaaaaagggagaccaggcccaggaaggaacgaggaagggccagaacggagacggggcgcgcc

SEQ ID NO: 249503 - RNA, 61 nt, Homo sapiens
gcaccggacaaagacccggaccgcagcaagacaggagggagccggaaacaaagaagaggag

SEQ ID NO: 249504 - RNA, 78 nt, Homo sapiens
accagccgaacccaaccacgccccagcagcaggaagggaccaagaaaggcccagggaccaaagcccggacaaggcccg

SEQ ID NO: 249505 - RNA, 71 nt, Homo sapiens
cgccaaaaccccccacacaccccgccggcaggccgagagaggggcccaggccggggaacgggagccgcacg

SEQ ID NO: 249506 - RNA, 79 nt, Homo sapiens
gcccccccccccacccccggaacagaagacgggaccgggagacagaaaccaggcagaccacaggccggggggggcacag

SEQ ID NO: 249507 - RNA, 69 nt, Homo sapiens
caagggcacgggaagaccggaggggacgaagaacggcagccagcgaggaacaagaagaacaacaagcca

SEQ ID NO: 249508 - RNA, 80 nt, Homo sapiens
agaaaggggaaccccggagaaaaggccaagaaggcagacagcccagaagaaaagagggcacaagccaaagagaccgaaga

SEQ ID NO: 249509 - RNA, 44 nt, Homo sapiens
cagccggcgcaggagcagcagcgcaggcggaggcagggcgcagc

SEQ ID NO: 249510 - RNA, 73 nt, Homo sapiens
ccaagcagagacacaaaaccggacccggaacaggccaaaagcaaaaagcccaggagcccaacaccgccaccgg

SEQ ID NO: 249511 - RNA, 45 nt, Homo sapiens
cgaaggcccagccgcgcccggagaagcgaacacccaggcagggca

SEQ ID NO: 249512 - RNA, 81 nt, Homo sapiens
gagcccccggccggagagcagcggcggcggcggcaccccgggcgcgggcgaagggagaaagcagaggagaaacacgaaggg

SEQ ID NO: 249513 - RNA, 64 nt, Homo sapiens
ggaagagcaaccccagaaggcaacgcgccgcaaaacagaacgcggaggcaggaaaggaaccagc

SEQ ID NO: 249514 - RNA, 73 nt, Homo sapiens
accgacggcgaagccaggacaccgccacaggagggaccagcaccggaggaaccgcacccaaagcaaacgccag

SEQ ID NO: 249515 - RNA, 77 nt, Homo sapiens
caagcaccagcagggaaggagaagagagcaagaaaagccgaaccaccacagaacgaggaggaaaacgaccacacaga

SEQ ID NO: 249516 - RNA, 75 nt, Homo sapiens
cgagcaaaacgggaagaaccaagaaaggggggcaggggaaggcgaacgacagacgggccaccagagaacccagga

SEQ ID NO: 249517 - RNA, 83 nt, Homo sapiens
ccagaaggcaccaccacagccgcccaccggaaggccaccccgcaggccaacggcagcggcgaaggagaccgcccaaaccaccc

SEQ ID NO: 249518 - RNA, 60 nt, Homo sapiens
cgggaaacccccacggccccaaagcccgcaccagagccggggcgcggcagcggaaccccc

SEQ ID NO: 249519 - RNA, 79 nt, Homo sapiens
agggacggccagaggacgcgcaaacccaacccggaggaccgcgccaacaggacgaggagaccgaccaggagaccccagc

SEQ ID NO: 249520 - RNA, 80 nt, Homo sapiens
gcggccggcacaccccgggcccgcggcggcgggcacccggaggcgcccgagcgcaccggcgcagggaagaaagaaagaca

SEQ ID NO: 249521 - RNA, 72 nt, Homo sapiens
agaacagcggccacccgacagcaagcaccggagggagaagacaggccccgggaccaaggacacgcagacccg

SEQ ID NO: 249522 - RNA, 71 nt, Homo sapiens
acacaacacggagcaggaggcagcagagggcccccaaggaagacagcacgagggaacagaccggaaaacga

SEQ ID NO: 249523 - RNA, 98 nt, Homo sapiens
cgcgccaaagggacgaccaaaaagcagcggacagcacaaggaaccacccgcggcagagcggagcccaaacacgcgccgcaccagagcggcgggaccag

SEQ ID NO: 249524 - RNA, 60 nt, Homo sapiens
agcgccggacagagaagcccccaaggagcgcagggaagaggcgacagacaaaagaaggac

SEQ ID NO: 249525 - RNA, 78 nt, Homo sapiens
aggcagaccgcaggcgcaaggccaggcgacccgacgggccaccgaagcaaagccagggagggaaccgaagccacgggc

SEQ ID NO: 249526 - RNA, 59 nt, Homo sapiens
ggaagacgggccgggcgcagggggagccgacgggcggaggcaaggcggaccagccacgc

SEQ ID NO: 249527 - RNA, 81 nt, Homo sapiens
caaagaagaaagcccacagagacacaaccggagcccagagccacgcaaaccagagagggcaacagggaaaagacgaaaccg

SEQ ID NO: 249528 - RNA, 69 nt, Homo sapiens
acgcccccaggagaaacgaggagcgcggccaccccccggaggacgccagaggggaagccgcacgaggga

SEQ ID NO: 249529 - RNA, 77 nt, Homo sapiens
ggacccacccgggcaaagaagagcaaaggaaaagccacaaggcaagaacaccaaagaaaccggcagacgcagaaaag

SEQ ID NO: 249530 - RNA, 56 nt, Homo sapiens
agaggcgcgcagccccgagacacaccgcccgcacaggcagacaaccccggggacag

SEQ ID NO: 249531 - RNA, 81 nt, Homo sapiens
gaaccagcgacaaccgcagaggcgaagcagaggagggacagcccagcaagcccagagcccgccggccccccagcagggccg

SEQ ID NO: 249532 - RNA, 82 nt, Homo sapiens
caagggccaaggcgaccaagggaggccccgggaggccgaggcgggcacaagggagcgccggaaacccgggccccggccccaa

SEQ ID NO: 249533 - RNA, 78 nt, Homo sapiens
cccagcacgcacgccaagacgaggccaacagcgcaggagcaccccacaggcccagaggaggcagggagggagaagaac

SEQ ID NO: 249534 - RNA, 73 nt, Homo sapiens
ccgaaaggggggcagggagagaaggaggacccgcagacacaacggaggcccgaccgagcggcccccacagcca

SEQ ID NO: 249535 - RNA, 69 nt, Homo sapiens
cacggggccacgagcaaacgagaggcgcaagagagcaaagcgggaggggcgaggggggaacggagagac

SEQ ID NO: 249536 - RNA, 91 nt, Homo sapiens
cacggggcaacaacccaccggcacccgcaagaagcaccagcaagggccccagggcaccccgcgacacaggcgcgcaaggccgacaacagag

SEQ ID NO: 249537 - RNA, 79 nt, Homo sapiens
cgggacggaccgagaccggaccgagagcggaccgagagcgcgaaacgcacgagaagaaaagcaaacgccagcagaccac

SEQ ID NO: 249538 - RNA, 52 nt, Homo sapiens
cagaagaagagagacccagacggggcgaagagggacccacaagggaaaacgg

SEQ ID NO: 249539 - RNA, 70 nt, Homo sapiens
aggggaaaggccacagaagaggagcagagacacgaaaagaaagcacagcaacacaggaacagaaaggaca

SEQ ID NO: 249540 - RNA, 62 nt, Homo sapiens
gaacccccccacaagccccagagcaccagaggaggcagaggagagacagcacccagacaaac

SEQ ID NO: 249541 - RNA, 74 nt, Homo sapiens
aagcaaagaggcgcccagaaagcagaacaggccaccgggccaacgaaaaaacagacacgccaccaagaaagcac

SEQ ID NO: 249542 - RNA, 81 nt, Homo sapiens
aaaaaacgaccaagccagagaacagcccccacgcagcccagaaggccggggggggcacagagccccggaagacagccccca

SEQ ID NO: 249543 - RNA, 63 nt, Homo sapiens
cggggcgcgggggccgcgcgaagacaggaccagggcacggagggcggagaacggaaaagcacc

SEQ ID NO: 249544 - RNA, 72 nt, Homo sapiens
acaaacagaacgcaaagaccgcgagacaagggaacagccgcgaaaacagacaccgcacaacaaggagggcgc

SEQ ID NO: 249545 - RNA, 68 nt, Homo sapiens
ggagcaaccccccaggacgggcggaggcggggggaccggcgggcgggacaaggcacgaggcgcggcga

SEQ ID NO: 249546 - RNA, 77 nt, Homo sapiens
aggcaacacagggacgcccagaaggaacgcaggcgagagcgagacaaaacagggcaaggcgcccagaagcggcgacg

SEQ ID NO: 249547 - RNA, 78 nt, Homo sapiens
ggagaaaacaacaagagaaggacagcggccaacaagaagaaccacacccacaagcggccgaggggaagaagggagccg

SEQ ID NO: 249548 - RNA, 71 nt, Homo sapiens
aagccgagacccagaccagcaggaaccgaggccgccggagccccagacaccccccacacaccaccgacgcg

SEQ ID NO: 249549 - RNA, 77 nt, Homo sapiens
ccagggaggcaggggcagaaacagagaaggaacagggacaaacagcaggggccaagaaagaaggagagggggcgaca

SEQ ID NO: 249550 - RNA, 86 nt, Homo sapiens
gcggaaagcggccaagaaagacaaagacccaggaacaaaccgggggcaaggccaaaaagaagaggcgaggggacggcggggagcgc

SEQ ID NO: 249551 - RNA, 75 nt, Homo sapiens
aaacacccagagcgcacaggaacagggccgccccaagggccggccagccaaagcaccggacggaaacccagagca

SEQ ID NO: 249552 - RNA, 54 nt, Homo sapiens
aaccagggccaccgcgcaagggagcgggaaacgcacaacagagaacagaaaaga

SEQ ID NO: 249553 - RNA, 71 nt, Homo sapiens
ggggcgcgccggaaaccggagcgcgcagcagaagccccgaggaacaaaaacaaacacacagaccaaaagag

SEQ ID NO: 249554 - RNA, 82 nt, Homo sapiens
ccccagcccgcgaccacagccagagcccagcaggagccgccacaccaggcaacagggcggcaaaaccccgaccgggggcggc

SEQ ID NO: 249555 - RNA, 74 nt, Homo sapiens
cccccggcgccgcgccggcggcggcacaaaccgaagagcccggggcgggacgccacgaaagaaagggagacaga

SEQ ID NO: 249556 - RNA, 56 nt, Homo sapiens
caaaagcacgagaggaagcagaagagagacacaacaagggacgaagcggagggcag

SEQ ID NO: 249557 - RNA, 83 nt, Homo sapiens
gcgagaaaagagaaaaccacagccaacaggaaccacacagaaggcagggccgaacacccagaggcaccgaacgggcaaggagg

SEQ ID NO: 249558 - RNA, 71 nt, Homo sapiens
aggcaccggacaggccaaggcaggggccagaagacaaagcaaccagacggggaaggaagccacacccaaaa

SEQ ID NO: 249559 - RNA, 76 nt, Homo sapiens
cagagcaggaaaaaagcgaaggcaacaggagcgggaaacgccaaggccgacaaaaccggccgggaagcaagaaacc

SEQ ID NO: 249560 - RNA, 66 nt, Homo sapiens
agagagacaacacaaaacaaggagcagaggaagggacgagagacacaggagagacgacccgaacaa

SEQ ID NO: 249561 - RNA, 69 nt, Homo sapiens
ggagaaggaccaagaaccaggcgccgcgcccggggagacagaaacgaggcgcccccagcagcaggagga

SEQ ID NO: 249562 - RNA, 80 nt, Homo sapiens
gccccagccgagaggacgcggcggaaacgaagcccacaccacgggaggggcacaccgggagcagcccggcacaaggaggc

SEQ ID NO: 249563 - RNA, 70 nt, Homo sapiens
ggggcggcccaccccccacgcaccgcacaacaagaggccggcggggcgacaggaaccgagccgcgaaagg

SEQ ID NO: 249564 - RNA, 70 nt, Homo sapiens
cgccagggaagaaacgggagccaacccgggaagagccacacggaaggaggaaaaaccaggaacgcagccc

SEQ ID NO: 249565 - RNA, 79 nt, Homo sapiens
agacagagaacagcggcggagaaccaccaccgcagacaccgaacaggagcagcgagggggggcaagggagaaaaagaag

SEQ ID NO: 249566 - RNA, 75 nt, Homo sapiens
ggcgggcagaaccgaccggagaacacaggaccgaggaagaagagccggggaacaagcagagagagaggggacccc

SEQ ID NO: 249567 - RNA, 114 nt, Homo sapiens
ccccccaacaggcggaaccaagcgcaagccgggggccacgcaaacacggccaggaagggccgcacccagaaaaagcgaaggagaagcgcaaagaaaaagcacgaagggaggaag

SEQ ID NO: 249568 - RNA, 69 nt, Homo sapiens
ccggaagaaccgcagccgagcggggccggccacaggaagagagaaggccacgcccgaccccaagcaaca

SEQ ID NO: 249569 - RNA, 51 nt, Homo sapiens
gccaacccaagggccccagcccgggcccccaacgaggagagagagagagag

SEQ ID NO: 249570 - RNA, 66 nt, Homo sapiens
gaaggaccaagaaccaggcggcaccaggacgccgaaaagcgaccggacgcaggcacagggacacgc

SEQ ID NO: 249571 - RNA, 75 nt, Homo sapiens
cgggcgcgggaagggccacccaccgcgaggacagggccagcggagcgaagccacagaacaaaaacgaccgaggaa

SEQ ID NO: 249572 - RNA, 72 nt, Homo sapiens
ccccgggcccgagcaccggccggagccaaacagaggaaagagcggagcccgccagaaacagacaccacgggg

SEQ ID NO: 249573 - RNA, 66 nt, Homo sapiens
accgaggagggaccgccacacccggagaagagaaaagaggaacacaaacagccaaagcagcggaag

SEQ ID NO: 249574 - RNA, 38 nt, Homo sapiens
cgcagggggggcgccacgacagagaggcggggcaccgg

SEQ ID NO: 249575 - RNA, 84 nt, Homo sapiens
gcagggccgagcgggccgggacaggcaacagccaccaaccaaggcaaccagcgagcgaacaaccacagaaacgcgacagggcca

SEQ ID NO: 249576 - RNA, 64 nt, Homo sapiens
gggcacaccggaagcagaagagcacccaggccacagaggaggaaagagaggggaaagaagcagc

SEQ ID NO: 249577 - RNA, 88 nt, Homo sapiens
agacccccaacccaccgaacgaacacacgggacaaccagcgacgccggagcagcccaacccaggccagaccagaaggagcacaggcgg

SEQ ID NO: 249578 - RNA, 70 nt, Homo sapiens
gcgcggggcccccaccgagccggcaaagcagccacaggaaccccgaaagaagagcgaagggccagaagcc

SEQ ID NO: 249579 - RNA, 100 nt, Homo sapiens
ccacgggaagcacgggaccgagaacggaggacaacaccaagcaagacggcgaagacaaacacccacagagggccacacaggaccaggcggacaagacggg

SEQ ID NO: 249580 - RNA, 72 nt, Homo sapiens
gccaccacagagccacacgagagcgaggaaaacgccacgacagacacaaccaagcaccggagaaaacccacg

SEQ ID NO: 249581 - RNA, 74 nt, Homo sapiens
gcccccgccgccccccagagacacaccggaggaaccggagaggacacagcagaagagaacacgcccgaaggagc

SEQ ID NO: 249582 - RNA, 39 nt, Homo sapiens
agcacccgccccgggcaccaacgaggcgaaaggaagaaa

SEQ ID NO: 249583 - RNA, 77 nt, Homo sapiens
gcaaaggcaaacgcgacacaagggcggaccgcaggcaaaacaaacagggggacacagaagagcagcagacacacagc

SEQ ID NO: 249584 - RNA, 82 nt, Homo sapiens
gcgacaacacccggccccgagacagaagccggccgagaaacagacaacccacagaacaaagcggaccaaggcacccccagag

SEQ ID NO: 249585 - RNA, 72 nt, Homo sapiens
cacagccaccagccagcaagcccaagccaggaaggccccacgaagaaaaaaaaagcggagaaggcacagaag

SEQ ID NO: 249586 - RNA, 80 nt, Homo sapiens
caaggccaggggaagccggggaaacccagcagcccgacagcagaacaacaggaacgcccaccaccaccgggcaaaaccaa

SEQ ID NO: 249587 - RNA, 80 nt, Homo sapiens
cccccccgcgcgcgccagccaggccccacccaaccagaagccggaacaaccggagaaaaagccgcagcgacccgcagcac

SEQ ID NO: 249588 - RNA, 82 nt, Homo sapiens
aggccgagccgggaccaggcccgggggcggcggccacgccaaggacgggaaacaggaacacgaaagaggaaaaacgcacaag

SEQ ID NO: 249589 - RNA, 81 nt, Homo sapiens
ggggagcgccagcaagccaggagaacacggcagccacgaggcggcccagccagcccgccggccccgggcccagagccgagc

SEQ ID NO: 249590 - RNA, 35 nt, Homo sapiens
gcacacagcggcccacagggagggaacacaaagag

SEQ ID NO: 249591 - RNA, 81 nt, Homo sapiens
ggggcgggagggcggaggaggagaacacagaaccaccaggagagcaagggaaagggagcagcaccggccacacccacagca

SEQ ID NO: 249592 - RNA, 70 nt, Homo sapiens
aaggcaaaagggacgaagggaacaagggaaaaccggacagacaagccccgagggacacggaaagcagcag

SEQ ID NO: 249593 - RNA, 57 nt, Homo sapiens
agccagaggcaacaaggcggacaagagaagccgccaggaaccaaaagagaccgggga

SEQ ID NO: 249594 - RNA, 79 nt, Homo sapiens
gggcggcggcggagggcccgggcgcggcggcgggacaccgagcccggggaggggccccgcgaggacacagcgggcaggc

SEQ ID NO: 249595 - RNA, 81 nt, Homo sapiens
cgcggcaagcggccacgacgaaggggcaagccgcccaacgagccacaaggcggccccaagagaggaacgaggcaagcacca

SEQ ID NO: 249596 - RNA, 80 nt, Homo sapiens
gacgggaagaacccacgcgcgacgaaaacgggagcgaccgcggaacgccacaccccgagagcccagcgcgaaggagagcc

SEQ ID NO: 249597 - RNA, 82 nt, Homo sapiens
cgggcaggcccccaagagccgaggcgcggcgcgccgaggcgcccaccaggcacccggacacgaccaaaacccccaaagccac

SEQ ID NO: 249598 - RNA, 79 nt, Homo sapiens
aggaaaggcaaagaacaagagaagacccagaggaagccaaaaggggggaggccaccaacgggggagcccgcaggaaaac

SEQ ID NO: 249599 - RNA, 50 nt, Homo sapiens
cccacccgccccgcggacccagggacaggcgcaggggcaggcaaaccgag

SEQ ID NO: 249600 - RNA, 72 nt, Homo sapiens
aaccgcggaggcaaccgcgcccccagagcccagggaagcagagccccgggccgggaaggggaaacggccacg

SEQ ID NO: 249601 - RNA, 99 nt, Homo sapiens
gccgcgggccgcaggccgcgagcagcggacgccggccgccgcaggaggggacacggaacccaaggagacgaagcgaagcaggagaaggaggggaaaaaa

SEQ ID NO: 249602 - RNA, 87 nt, Homo sapiens
gagacagagcaagaaaagcccgggagcagaagggaggcccaagacccacaacaaaagaaggacagaaaacgggccccagacacaagc

SEQ ID NO: 249603 - RNA, 64 nt, Homo sapiens
cccaacccgggaccaaacggccaagaagccagaagcagaagcaggccggacacccaacagcacg

SEQ ID NO: 249604 - RNA, 63 nt, Homo sapiens
aacgcggaaaaccgacacaacaggagggccagagaaaaacccaagacgacacgcgcgcagaaa

SEQ ID NO: 249605 - RNA, 68 nt, Homo sapiens
gcgcgccgcgcgggcgcccgaaagagccccaagcccgcagccccagaagaaaaacacaggccgccgcc

SEQ ID NO: 249606 - RNA, 77 nt, Homo sapiens
ggcagagaacaagggggaggccacggccaagacgccaagaagccggcgcagcacagcaggaacagcgcggaccccgg

SEQ ID NO: 249607 - RNA, 67 nt, Homo sapiens
cgacaggccaggcagaacaaacggaccagcgaccgggcaggaaacccaagcagccaaccccccccca

SEQ ID NO: 249608 - RNA, 77 nt, Homo sapiens
ggagaacagaagccagccgacaagggcagaacgaacaggaacaaagccagacggccccgggaccaaggacacgcaga

SEQ ID NO: 249609 - RNA, 68 nt, Homo sapiens
ggggcggcggccacgccaaggacgggcaggcagcggaagagaaagaccgaggcaaagaagcaggagca

SEQ ID NO: 249610 - RNA, 77 nt, Homo sapiens
ccggagagccgcaggacggcgcggcagagccccgacgccacagaacgggaacgaccggggaagaagaggaacacccg

SEQ ID NO: 249611 - RNA, 76 nt, Homo sapiens
cgaagaagcccggacagacacagggggaggaacagcccggggccgcaaggccaggcgcgcagaggcacccaacggc

SEQ ID NO: 249612 - RNA, 75 nt, Homo sapiens
gcaccccacgcaccccaccagagaacggaagagaggacagcgagacagaaccccggagccccccgggcacacgcg

SEQ ID NO: 249613 - RNA, 72 nt, Homo sapiens
gcccgggccacccccccaggcaaggccccgggggcgccgagggcacaagggcaacgacagaagggcgaagcc

SEQ ID NO: 249614 - RNA, 80 nt, Homo sapiens
cggcggcgagagaccacgggacgcgacgcgccccgcccccccgccggcccccccacggaaggggggccgaaaagaaggac

SEQ ID NO: 249615 - RNA, 87 nt, Homo sapiens
ccaagcccagacaagccccagggaagccacagcaccccagcacccagaaacaacgaacgagcaaggaagggccaaggcagaccccac

SEQ ID NO: 249616 - RNA, 37 nt, Homo sapiens
gagacagagcaaaaccagggagagaacagcacacaga

SEQ ID NO: 249617 - RNA, 61 nt, Homo sapiens
gcagaaacacaggaccccccccaacgaggcacggaaggacgagcgcacaggagccggagga

SEQ ID NO: 249618 - RNA, 77 nt, Homo sapiens
cacgggccccagcagcccaggcagagaccagaccggaagaagcagggaaagcagaaaaaaggaccagaccacaagcc

SEQ ID NO: 249619 - RNA, 74 nt, Homo sapiens
agcgcgcacaacgcaggaccggcgccgaaggcccgccagagcgcaaaagacaacccacgaaaaccacacccagg

SEQ ID NO: 249620 - RNA, 68 nt, Homo sapiens
ggcgaccgagcgacgcggcgaggcgggcaccgggcgccagggagaagcagaagcccgcacagagcagg

SEQ ID NO: 249621 - RNA, 104 nt, Homo sapiens
gcccggaccggccgagaggaagacgagccgggaggaacggcccggaaacaggaggacccacccaggcccaggaccgagcccgacgcccacagacaggcgaacgc

SEQ ID NO: 249622 - RNA, 69 nt, Homo sapiens
ggagccggcagaaagcgacaaggaggagggagaacaaggaaccggcccagggaaaaaggagccaccaca

SEQ ID NO: 249623 - RNA, 56 nt, Homo sapiens
acaacccgacccgacgagcgagaggaagagagcgaaacaccagaggcgggacccag

SEQ ID NO: 249624 - RNA, 75 nt, Homo sapiens
aaagcaaaccagcaggcaccaaggaaagcagaagacaagggagccgccaccaaaagcagacggaaaacccacggg

SEQ ID NO: 249625 - RNA, 55 nt, Homo sapiens
ccagccgacacgacgccgccggcaggcccgcgcaccaggagaaggaccaagaacc

SEQ ID NO: 249626 - RNA, 62 nt, Homo sapiens
ccaggagagagggggcgcggcaaccggaggcaagggagaaaagggcaaacacagcccaacaa

SEQ ID NO: 249627 - RNA, 68 nt, Homo sapiens
acagcgagagcccgccacgccacaccgggacaaacaggaaagagacaggcaaaaggacccgggcgaaa

SEQ ID NO: 249628 - RNA, 71 nt, Homo sapiens
ggaaaggcggagcaacggagaacacacggagcaagacagcccgagaaccggaacagaaacggagaagcgga

SEQ ID NO: 249629 - RNA, 72 nt, Homo sapiens
aaccaaagccaaggagaaaacagagcaaacgagcgcagaagggcacaaaaccgccccagccaggaggcagca

SEQ ID NO: 249630 - RNA, 67 nt, Homo sapiens
ccccccccggcaggagaggcggcaggccggggccagcagcagagagacagggaagaagggcaccagg

SEQ ID NO: 249631 - RNA, 64 nt, Homo sapiens
cggacggcacagcccgccgaacccgaaaggaggagggggccacggagcgaaagccgcagccaga

SEQ ID NO: 249632 - RNA, 62 nt, Homo sapiens
cgggacgggaggcccgcgaggacccggaggccaggccagagggaccaacgaaggcaaacacc

SEQ ID NO: 249633 - RNA, 72 nt, Homo sapiens
gccccaggaccgaacgaccgccgcggcggggcccaaacagcagaggggcagcgcagggcaccggcgcagccg

SEQ ID NO: 249634 - RNA, 67 nt, Homo sapiens
cgggacaaacgagggaaaggagggaaaaaaggggcagccaaagaaaacagcaccgagacaaccaagc

SEQ ID NO: 249635 - RNA, 124 nt, Homo sapiens
aaccccgaagaccggggagggacagccccaggagccggggccgcagccaccaggacgcaaaggagcccgcgggcgcccaggggggcggagagcccaggcgcccagccccacgggaaggacagga

SEQ ID NO: 249636 - RNA, 77 nt, Homo sapiens
gaaaaaacgaaacggagagacagccgacaccgaaggagccagcgccccgaagaagagccgccgcagcgccccgaccc

SEQ ID NO: 249637 - RNA, 39 nt, Homo sapiens
ccccaaagcgcgggaacaggcaagacagaagacaccaga

SEQ ID NO: 249638 - RNA, 81 nt, Homo sapiens
ccgccgagcccgcgccccccccgcccagagcaggcggcagcagccgccgagggcgccgccaggccgaggaaggcgggggag

SEQ ID NO: 249639 - RNA, 78 nt, Homo sapiens
gggggaaaaccaaagagccggacgcaggccccgccaccccccaccggggacagaccaacgggagccgcaaggacaaca

SEQ ID NO: 249640 - RNA, 71 nt, Homo sapiens
agcggcgaacccaaagggccacgcccagacgccacacacagaacgacaccacagcgacaaccggcgaacca

SEQ ID NO: 249641 - RNA, 74 nt, Homo sapiens
gccggaagaaccgcagccgagcggggccggccacagggagaagagcaaccggacacagaaggggaaggaaaccc

SEQ ID NO: 249642 - RNA, 68 nt, Homo sapiens
gggacccagaaggaaagaaagggaccaccagacccacaggcagcccccacccccgccccggcaagccg

SEQ ID NO: 249643 - RNA, 65 nt, Homo sapiens
cccgcaccgcggcaaagagaggacgcagcgagaaagggggaaacccgcccagggcgggagaccgc

SEQ ID NO: 249644 - RNA, 79 nt, Homo sapiens
gcgggccggcgagcgcagcgcgaccgggaggcccaggaacggaaggccaggaaaggggcggcgcacagccaaggaacag

SEQ ID NO: 249645 - RNA, 51 nt, Homo sapiens
ggaagaacaagaagagaaccgaagcaagggcagaaaagaagcagagaaaac

SEQ ID NO: 249646 - RNA, 73 nt, Homo sapiens
agcggcgaagaggcaccggaggagcgaaccaccaggagcggaagaccccaggagagcggccccggcaaagcga

SEQ ID NO: 249647 - RNA, 76 nt, Homo sapiens
gacggacagaccaacgggacaagaagacaaccgagcacaaaaaaggcacccggagaacagacagaccagccgaacc

SEQ ID NO: 249648 - RNA, 81 nt, Homo sapiens
agggcagggccagccggccccgggcagcggacacccgaaggcccgggccacggacagggccacccaggcccgcagaagacg

SEQ ID NO: 249649 - RNA, 72 nt, Homo sapiens
ggaggaaggagggcagaaccaccacacgaagcgggccggggacacaagcaacagccagaacaagccgaagca

SEQ ID NO: 249650 - RNA, 85 nt, Homo sapiens
gccggaccagcccagaaggcagcggcggcccaggccagcacccgcagcacgcagcacgggggcaggggccgacccagaacgccag

SEQ ID NO: 249651 - RNA, 79 nt, Homo sapiens
agcacaagagaggacaaaaaacaccccgaaaacagagggcagagccagagaaggaccaaagcaaacagggaacaaccca

SEQ ID NO: 249652 - RNA, 69 nt, Homo sapiens
gagaaaaacgaaaaggacccgaccaaccggcaaaaagcggcgaaaagggacgcccccgaacagacaacc

SEQ ID NO: 249653 - RNA, 96 nt, Homo sapiens
cggagccggcgggcggggaacccaggccccgccgaggcggccaggacacaccggaacaaagaaaaccaaaacgcaacagaaacaacaggcaagagg

SEQ ID NO: 249654 - RNA, 53 nt, Homo sapiens
agacgaaaaaccgccagaaaaagccaacaggcagaccagagacagcgccacgc

SEQ ID NO: 249655 - RNA, 43 nt, Homo sapiens
aggacgagaacagcaacaggagcgggacggagcgggccaccgg

SEQ ID NO: 249656 - RNA, 60 nt, Homo sapiens
gcccggcggcgcaccgggcggcagacccggcaggcgaaaggaagacccagccgagcaggg

SEQ ID NO: 249657 - RNA, 55 nt, Homo sapiens
ccacggacccaaaccagaagaaaaccgaaccgaggcccaaccccggggccgagcc

SEQ ID NO: 249658 - RNA, 77 nt, Homo sapiens
cacacgcaccagagccagggcgcaggagcagcagcacagggaagaaagacccggggaggagacacaggaccaggccc

SEQ ID NO: 249659 - RNA, 72 nt, Homo sapiens
cacgacaaccgggcagagagaaggaaacacagaggaagcggagagaagaaggaaacaccagccgggaagagc

SEQ ID NO: 249660 - RNA, 89 nt, Homo sapiens
cgcggccgcaagaggagaccaagaggcgggggcgcacgacaaccagcagccgagaggggccagcagcccccccgagggcgcagcaacga

SEQ ID NO: 249661 - RNA, 48 nt, Homo sapiens
cgcgccacccccaaaagacggaacaacacgaaccaggccgaccacacc

SEQ ID NO: 249662 - RNA, 71 nt, Homo sapiens
accggaacggcggcgacaaggggcccgaacagagggccgaagaaaaggagagaggcagaccaaaacgggcc

SEQ ID NO: 249663 - RNA, 75 nt, Homo sapiens
aaccgcgaccaccaggagccggagcacacgaaagcgcgcagaagcccccggccacaccacccaacacaagccgac

SEQ ID NO: 249664 - RNA, 83 nt, Homo sapiens
cccagagagaccaccgaggagaagaccccacccagacacaaaaccgagacagcaaaaaggaggacccgcgacccaccggacca

SEQ ID NO: 249665 - RNA, 77 nt, Homo sapiens
ggcgcaagcgaaaacagaccgcgagcccagaggaagaaaacaccggagcccaagacaccaaaacagacgcaggcaag

SEQ ID NO: 249666 - RNA, 59 nt, Homo sapiens
cccacgagaccagagagggaaccacaaccccaccagagcaacacgcgccaaccccagag

SEQ ID NO: 249667 - RNA, 62 nt, Homo sapiens
aaagggggcagcaaaaggcagcgggcggaggacggggcaccagagaacccaccggaagaacc

SEQ ID NO: 249668 - RNA, 73 nt, Homo sapiens
aaagagaccggcaaagcacggacgggaccaagacaccggccaacgaaggggggcgaggaagagacaggcgggg

SEQ ID NO: 249669 - RNA, 117 nt, Homo sapiens
gaaagggggagcagaggcaccaggcaaaaccagagacggcgccacagccagagccaccccagccgaagaaaggcccacgcccacaaaccaaaaacaaaagccgcagagaagaggacg

SEQ ID NO: 249670 - RNA, 68 nt, Homo sapiens
gaaagccgcggaaccgcgacaccaagagggaagcacagaggaaccaggacagaaacccacagaaagag

SEQ ID NO: 249671 - RNA, 79 nt, Homo sapiens
cgggcgccagccaggaggaccggcaggaccgacgagcccgggagacaccaccggaagagaagaacgaccggaagaggag

SEQ ID NO: 249672 - RNA, 59 nt, Homo sapiens
agaagagggcggagcggagacgggagaagaaaagacgccacagacaagccggcacggag

SEQ ID NO: 249673 - RNA, 55 nt, Homo sapiens
aggacggagacagccaggagcacagagcagcacaaggaaaacgagagaaacgaag

SEQ ID NO: 249674 - RNA, 79 nt, Homo sapiens
caacaagcgaggggacccagagaagaaacaacacaggacgagcagggggaggaacaaagcgaggaagggaagggaaggc

SEQ ID NO: 249675 - RNA, 66 nt, Homo sapiens
aggaaggaacgcaaacgagccagcaagcccaaaacggaacaggagagcgaagacaccacccaaagg

SEQ ID NO: 249676 - RNA, 81 nt, Homo sapiens
gcaccgaacccggggggccgcggcggagcgccggccggcggggagcgccaaggccgcagaggcgagagacgagacaccgga

SEQ ID NO: 249677 - RNA, 66 nt, Homo sapiens
aggcaacgcgccgcaaaacagaacgcggggaaaagaaaccaagcaaaacagaagaaagggcacaac

SEQ ID NO: 249678 - RNA, 87 nt, Homo sapiens
ccggcggcagaccgacacgccggggcgcccgcgcgcggggaccccacgggaaaaacagagcggggaaagaccaacaaagcaccgaga

SEQ ID NO: 249679 - RNA, 53 nt, Homo sapiens
gaccccaaagaaggcccgcagaccgaaggaaagggagagaggagaaccaggca

SEQ ID NO: 249680 - RNA, 78 nt, Homo sapiens
gcaggcaagcggaagaggcagaggcgcggggaccaaacaccccggagccgcagagagaagaagcgcccaagaaggaaa

SEQ ID NO: 249681 - RNA, 62 nt, Homo sapiens
gcccccgagcacgcagccaaccccagcaaggagcagggcaaaggcaaccagccagcccgcag

SEQ ID NO: 249682 - RNA, 56 nt, Homo sapiens
gcgccgccccgcgcgcgagccacgcagcccccagcggccaggcgacgagagaggcg

SEQ ID NO: 249683 - RNA, 40 nt, Homo sapiens
gcggcggcggcggcggcggcggcgcaaaaaccagacaccc

SEQ ID NO: 249684 - RNA, 79 nt, Homo sapiens
acgcgcccaccgcgggagggccgggcgggcgaggccagcaccccacccgcccacggcacgcacccagaccgggaggaca

SEQ ID NO: 249685 - RNA, 80 nt, Homo sapiens
ggagcccgaaggacaagcagcacacggcccccagaacaaccgcggggcacacaaagaaaggaacaggaagcagaagcaag

SEQ ID NO: 249686 - RNA, 70 nt, Homo sapiens
cagagggagaacacacagagaggcaagcccacaccaccgcgaccaagccagcaacagggcccgccacggg

SEQ ID NO: 249687 - RNA, 68 nt, Homo sapiens
aagacacacacgggagaagccgagaaggggcggaagaccggagcccgaagggagcagacaggcgccca

SEQ ID NO: 249688 - RNA, 32 nt, Homo sapiens
agaggggcgggcgagaagacgggaagccaagc

SEQ ID NO: 249689 - RNA, 78 nt, Homo sapiens
ggaccgggcggcacgcacgcgggcagggaacaggcggagcggaaggggccgcaaggccaggcgcgcagaggcacccaa

SEQ ID NO: 249690 - RNA, 76 nt, Homo sapiens
ccggcccagcaaccgacaacgcggcccgaaagccaacaggcagaccagagacagcgccacgcacccggggagcaga

SEQ ID NO: 249691 - RNA, 72 nt, Homo sapiens
agcaacccaacccgcacagaagagcaaaagacggaccgaacagacacaaaaaagcgcaccaaagaaccaggc

SEQ ID NO: 249692 - RNA, 102 nt, Homo sapiens
gcccgccgcccgccccggcacacgcgcagccccggccccggcccgccggagaaacagggcaaaggggacggaaacaagcagcacccacgccaacacgaacca

SEQ ID NO: 249693 - RNA, 54 nt, Homo sapiens
acggcccagccgagcacagaccgaaggaagggaacacggacgacgagacacgac

SEQ ID NO: 249694 - RNA, 60 nt, Homo sapiens
ggccaggcggccccgagcggaacggagaaagcgagggaagagccagggacggagagaaaa

SEQ ID NO: 249695 - RNA, 72 nt, Homo sapiens
ccagcaaaacggccgaagagagcgcacagccggccaggagggggccacaccgaacccagccgggaggccaag

SEQ ID NO: 249696 - RNA, 84 nt, Homo sapiens
ccgccgcggagacccagcgcacgggagcagccagacaacagcgcgaagcggacaagcacaaaacacaagggccagcaagcaaga

SEQ ID NO: 249697 - RNA, 72 nt, Homo sapiens
gaacaggaacaagccgaggccacagagccacacaaagaaagaggaggcaacagagcaaggcgagaaacgcca

SEQ ID NO: 249698 - RNA, 84 nt, Homo sapiens
gcggcgcagggacccgggacagcggagagacacgagaggcgagggacgacagagcaagcggcagagggcaagcgggaaaaagac

SEQ ID NO: 249699 - RNA, 72 nt, Homo sapiens
gggaaggacagaagacagccgcaaccaaaggaaaccccggggcagcggggggcgaagaggcggcccccaacc

SEQ ID NO: 249700 - RNA, 75 nt, Homo sapiens
agcccaggcggacagaggacgaagggccgccccccgggcgaggcagagacgccaggggcaaagcgcgggaagcgg

SEQ ID NO: 249701 - RNA, 80 nt, Homo sapiens
gacgaagaacagaaggcgacaaggccaagaccgccagcaaaggaagacgaggcagaaggccagacacacaccaacaaggc

SEQ ID NO: 249702 - RNA, 47 nt, Homo sapiens
ccggagaaaaggccaagaaggcagggaccaggaggagaagcaaccag

SEQ ID NO: 249703 - RNA, 72 nt, Homo sapiens
aggagaaaggagacgcagaacgggcagagaccgcaggaagaagcgaagaggccagccaggaaagcgggagcg

SEQ ID NO: 249704 - RNA, 41 nt, Homo sapiens
ccggaggcgggacccagggcccagcgagaaccagccaaaac

SEQ ID NO: 249705 - RNA, 71 nt, Homo sapiens
cagaacaccgagaacaaagggagacgagcaaagaacgggacacggagacggacaaacacccaccagcagca

SEQ ID NO: 249706 - RNA, 67 nt, Homo sapiens
gggaaaaaagagaggagcgaacgagacagaacaggaaaaaggggggcccccgcagaccccgcaaggc

SEQ ID NO: 249707 - RNA, 72 nt, Homo sapiens
ggccagagaaccggccccgagaacaaaagaagagcccagaagaggcaaacaaggagagagagcgcaaacacg

SEQ ID NO: 249708 - RNA, 79 nt, Homo sapiens
gccagggaacccggcaccgccccaggagaagacagaggagccagaccaagagacagcacaggcgagcgagcagagacac

SEQ ID NO: 249709 - RNA, 84 nt, Homo sapiens
agaagaaagacagagaacaagaccacagaacgaccaaccacagacaccacgcagagacacccaggccgacagggcccccggccc

SEQ ID NO: 249710 - RNA, 81 nt, Homo sapiens
ccggcgacacgcgaccagagaagcaagccggccagagggacccaaaacgaaccaacagaccaggcacagcacaacagaccg

SEQ ID NO: 249711 - RNA, 56 nt, Homo sapiens
aggcgcccaagaggcgacgccggcggaaacgggccccagggacagcggaggaagaa

SEQ ID NO: 249712 - RNA, 84 nt, Homo sapiens
acgcagggaagcccaggggcaggccagcgagaccgaggagaaggcccgacagccagcaccaggacccacagcggaacggcaagg

SEQ ID NO: 249713 - RNA, 78 nt, Homo sapiens
gagcccagccgaaggagaaggggggggaacacccacccggagaccggaccgaaggcagagccaaggaaagcacaacgg

SEQ ID NO: 249714 - RNA, 80 nt, Homo sapiens
aacacagcccccacagacggggacgggaaccccgagagaagagggaccaagaaaggcccagggaccaaagcccggacaag

SEQ ID NO: 249715 - RNA, 68 nt, Homo sapiens
ccaacccgcaagacacccagcacggccacacaacgaaaggagaccaaaccacaggaggcacaggagga

SEQ ID NO: 249716 - RNA, 88 nt, Homo sapiens
ccgcgaccggcgaggcagcccgggaggccgaacgggagggcgcacggaagaggcggccgggagagggccaagacggcagaggcccgca

SEQ ID NO: 249717 - RNA, 74 nt, Homo sapiens
aacccacgaaccaaaagggacggacaaaggaacaggaccaggagaaaagcgagaagccgcagcaagcgggcggc

SEQ ID NO: 249718 - RNA, 80 nt, Homo sapiens
cccacccaccaaaccggagggggaaaaaacccaaggcgcaaagcccgaagagccaaccacaggagggaaaccacgcaggc

SEQ ID NO: 249719 - RNA, 36 nt, Homo sapiens
agcgaaaggcgggaaggcaccaagaaaagcgcacgc

SEQ ID NO: 249720 - RNA, 76 nt, Homo sapiens
cgggggcgcgccccgcgcgcagggaccgcccgaccagggcgcggggaggcccagcccgccgcagggccaccccgcg

SEQ ID NO: 249721 - RNA, 77 nt, Homo sapiens
aaccccaggagcaagggaaggagcccggaggggagggaagagacaggaagagggcccaggcggggccggggagcccg

SEQ ID NO: 249722 - RNA, 82 nt, Homo sapiens
gacggaagggccagccaccgcaccccaaaaagggacgcgcagagacccagcgccaagagccggcccaggagcagcagggagg

SEQ ID NO: 249723 - RNA, 58 nt, Homo sapiens
agcccccagggcccacccacagacaacgaaacaacgaagcagcgaccaacgggaaggc

SEQ ID NO: 249724 - RNA, 82 nt, Homo sapiens
cacgcggaccccagggccggcccggaggcgggacccagggcccagacccggaggaaagcccagagggaagcgcaagaagcag

SEQ ID NO: 249725 - RNA, 79 nt, Homo sapiens
aaccagcagaaaaaagagccagaagagcgacggacagaacaaaagcgaaaagcggcaagaacagccagaggaacagagg

SEQ ID NO: 249726 - RNA, 76 nt, Homo sapiens
cagaaaggaaacaaacacgacggaggggcgagagggggcacccgaggaggaagagggcagggcccacggaaagaag

SEQ ID NO: 249727 - RNA, 82 nt, Homo sapiens
agcgacaaacaggaaaggaagggaaaaggccgaggcacagcgggaagaccgcaaagacgacccgagacagggaacagcagcg

SEQ ID NO: 249728 - RNA, 87 nt, Homo sapiens
gcagacggggaaccgcgaacggggccgccgcggaagaaggcccgccacgcacagcgaggagccacaacaaggcagaagaagccgcca

SEQ ID NO: 249729 - RNA, 73 nt, Homo sapiens
aacaccgaacaaaagacgggaacggagccccccgcacaggacaaccaccagccacggacacaccgcaggcaag

SEQ ID NO: 249730 - RNA, 79 nt, Homo sapiens
ggacgccgaccggagggggccggggagcccgaccggaccgcggaggacagggggacagcagcaccagaaccaaaaagcc

SEQ ID NO: 249731 - RNA, 77 nt, Homo sapiens
ggaggaccggaggggacggcagaaaggaagccacagccacgaggaaacgggcccgaacaagagccgcgcgcccccac

SEQ ID NO: 249732 - RNA, 51 nt, Homo sapiens
cgaaacagcggggccacccagaacaaaaagggccagaaagcccaagcgcaa

SEQ ID NO: 249733 - RNA, 40 nt, Homo sapiens
ccaccccggggagcaacagggacgagccgaaggcggacag

SEQ ID NO: 249734 - RNA, 73 nt, Homo sapiens
ccagcacgggaccccccaagagaagcgcaagagcaacaccccaccccaaggaaaaccaacagagacaacaaag

SEQ ID NO: 249735 - RNA, 82 nt, Homo sapiens
ggcgcgggcggacggcgccagccaccccgccacggaagcgccaccagggaaagcaggcaggagggagagcgccgaagaacca

SEQ ID NO: 249736 - RNA, 58 nt, Homo sapiens
gcgacacaaaacaccaagcacacccaaaacgcggccaagaaaaaacagaacaacaaga

SEQ ID NO: 249737 - RNA, 58 nt, Homo sapiens
gcccacaccgcgccagcggaaaacagaaggggagaaagacagcaaagaaaaggagaag

SEQ ID NO: 249738 - RNA, 77 nt, Homo sapiens
cacccgaccgggccgaccacggcgccggccgagcccgggaaaacgacagcagcagcagggccggaagacgccaccgc

SEQ ID NO: 249739 - RNA, 77 nt, Homo sapiens
gacggggaggcgcggccaacggggccacaagacaggccggacacaaccacaaacgagccacgccaaagggcccggcc

SEQ ID NO: 249740 - RNA, 72 nt, Homo sapiens
aaaagcaaggagaaaaggaacaccacaaacaccgggggaagcgagagcaacgagagagacaaaggaaacgaa

SEQ ID NO: 249741 - RNA, 59 nt, Homo sapiens
cacggcacggagaagacccagaaaggacaggccacccggccagaccaccagcgaagacg

SEQ ID NO: 249742 - RNA, 69 nt, Homo sapiens
cgacagggcacagccacggcacaccggcaaggaaagggacagaggaccgccaagaagaagagagaagga

SEQ ID NO: 249743 - RNA, 75 nt, Homo sapiens
ccccgggggccacgagcgggccaaagagaggagagacggcgagcacaagaggaccacgaaaaccccagaagaacg

SEQ ID NO: 249744 - RNA, 56 nt, Homo sapiens
cggagaccaggcaagcagggaccggagggaagaagaaggaaggcagagcccacaaa

SEQ ID NO: 249745 - RNA, 69 nt, Homo sapiens
agagcacaggacaaaacgaagaagaccacggaaaccagacaagcggcaaagacacaaaccccaagaccg

SEQ ID NO: 249746 - RNA, 83 nt, Homo sapiens
cggaggggggcgccggccgagaccgagacgggcgccccccgccggcccggccagggcaacaggcaccgacagaggcgagagcg

SEQ ID NO: 249747 - RNA, 34 nt, Homo sapiens
ccccgagggcgggacacagggccagccaccaggc

SEQ ID NO: 249748 - RNA, 57 nt, Homo sapiens
gccgccgcccccggggaacacagacgcgacaaacagcggagagggccggggggcaga

SEQ ID NO: 249749 - RNA, 73 nt, Homo sapiens
cacgaacagaacccccacccacaggggaggcaagcaggggggcaaaggaaagaaggcagaaagggaggccagg

SEQ ID NO: 249750 - RNA, 35 nt, Homo sapiens
ggaacagacaaagcagcggggggagaagaacggag

SEQ ID NO: 249751 - RNA, 79 nt, Homo sapiens
aggagggcagccaaccaccagcccgggggcagcagagaaaccaggcggggaacaagccagcagcccaaggagaagcccc

SEQ ID NO: 249752 - RNA, 86 nt, Homo sapiens
cgggagccccgcgacgcgcccggcccggagcccccagcgcagcggccgcggggcccagacagacgagagcggcacgaggaccaagg

SEQ ID NO: 249753 - RNA, 73 nt, Homo sapiens
gcgaaggcgggggagacgaaaacacgcaccaagcccacaagaggaaaaccgggaaaagcacacaacaggcaaa

SEQ ID NO: 249754 - RNA, 109 nt, Homo sapiens
gaaaagacgcagagacggcacagaagcagaaggacaagaacgcagaccggcaacaagcaagagaggcccgagaaagggcgaaaaagaggcgaagaaagccagaggacag

SEQ ID NO: 249755 - RNA, 39 nt, Homo sapiens
caccggcgggaggaacaaaaggaccagcaccagggacca

SEQ ID NO: 249756 - RNA, 82 nt, Homo sapiens
cccgagagcggaaacaggaaggccaaccgcgacgggccccaaacggaaccgaggcccggcccggacaggggaacagcagcgg

SEQ ID NO: 249757 - RNA, 78 nt, Homo sapiens
agggcggaggaggagaacacagaaccaccaggagagcaaggacacggaggaccggagcagcagagacagcaagagcgg

SEQ ID NO: 249758 - RNA, 80 nt, Homo sapiens
cccagacacccaagagggccaagccagaaaacagaaacgaaacagaacagagagaagcccagacacccagagcaacaaac

SEQ ID NO: 249759 - RNA, 69 nt, Homo sapiens
cccaacaaccaaccaggggacaacccaaagacggccaccgcgcaggaccagcaccacggcggacagcca

SEQ ID NO: 249760 - RNA, 73 nt, Homo sapiens
aggaccaagaaccagggccggcccagggagaacgcaaaaccaccacccccacaaaaaacgcagggagaaaagg

SEQ ID NO: 249761 - RNA, 73 nt, Homo sapiens
gggaacacccaaccggagaaagacacggacgcaggaaagcccgagcagaaaccgaaagaggccaaccaaggcc

SEQ ID NO: 249762 - RNA, 74 nt, Homo sapiens
ccggcgagagcggcggcccggggcgcggacagggggacagcagcaccagaaccaaaaagccacaacagggaggg

SEQ ID NO: 249763 - RNA, 69 nt, Homo sapiens
gcccccacccgcggggcacaccccccggaccgcgccgcccccccggccccaagaaggccacagcacgac

SEQ ID NO: 249764 - RNA, 68 nt, Homo sapiens
accagggccacccaaagcaccaagaaagaggcccaaccaaagacaggaccaaagggacacagaagaca

SEQ ID NO: 249765 - RNA, 78 nt, Homo sapiens
ccacggcacggagcaggggacacagccgcagaccccacggccagcccgggggccccgcacgacccgcggaacagggac

SEQ ID NO: 249766 - RNA, 63 nt, Homo sapiens
acggaaggcaggaagccggggcggaacagggcgcacacccgcacgagaaacaaccagaaggca

SEQ ID NO: 249767 - RNA, 80 nt, Homo sapiens
cccgagagagccaccagacggagcacggcgcaggggcaggaggagcgccagacccgggaagaggaagaccaacacagaaa

SEQ ID NO: 249768 - RNA, 79 nt, Homo sapiens
ggcgacccgccagccccgcaccagcgcggccacgcaaaggcaggaacggacgggagacacaggaagagcgggccaaccg

SEQ ID NO: 249769 - RNA, 81 nt, Homo sapiens
cacagcccaaggcgcagcccccggcccaggccaagaaaaagagcgaacaccacccgagacccagcacagacaggaaaaacg

SEQ ID NO: 249770 - RNA, 70 nt, Homo sapiens
cggaacgccgaagggcgaccccaacaggaaaaggcgagaaaggcacgcgggccgagaaaggcacacagaa

SEQ ID NO: 249771 - RNA, 78 nt, Homo sapiens
agaggaagccgaggaccaccacagaaggaagaaggaggagacacaaaacagaaaaagacaagcaaggcggagggcagg

SEQ ID NO: 249772 - RNA, 67 nt, Homo sapiens
aggaggccacccccaaagaaaagaacgaggaaccccagagaggacagaagccaaccaggcagcagag

SEQ ID NO: 249773 - RNA, 58 nt, Homo sapiens
gaccaagaagccagaaccaaaaggcaagggaacagaggcgcaccagccagaacagccg

SEQ ID NO: 249774 - RNA, 67 nt, Homo sapiens
aaggaccaagaaccagcgcccgagcggcgccgacacgggaagagacgcggcgccggcgacgaggcga

SEQ ID NO: 249775 - RNA, 57 nt, Homo sapiens
cccagggccacagggcaccagacagcgacgagaaggacagagcgggagccaccagcg

SEQ ID NO: 249776 - RNA, 68 nt, Homo sapiens
ccaccagccaagaacaaagaaacggacaacagcgagaggccagcgaacgaacacgaagaagaccaaca

SEQ ID NO: 249777 - RNA, 104 nt, Homo sapiens
gaggagacggccagaggagagcagaccaagaaagcagaagccccaaaaacagcagaggagcaggcagagcagcgcaggaggagagacccgccaccggaaccaga

SEQ ID NO: 249778 - RNA, 84 nt, Homo sapiens
agcggccggcgggagacgcagcgcgacccagcagggacgcacaccgagacgaacacagaacagcacgaccagaggggaagccaa

SEQ ID NO: 249779 - RNA, 74 nt, Homo sapiens
cccagaggcccagggaggcaggggcagaaacagagaaggaacagccaacgggacccaggggagcgacagccaaa

SEQ ID NO: 249780 - RNA, 74 nt, Homo sapiens
cccacaaagcaaaagagagaaagaccagggagcaacgggaggaagaggcgcagcacgaagcaaccgaaggggcc

SEQ ID NO: 249781 - RNA, 70 nt, Homo sapiens
gcgccgccgaccccccggcgccgcgccggcggcggaagaccgcaggaaagcaggaaggcaagaaagccaa

SEQ ID NO: 249782 - RNA, 74 nt, Homo sapiens
gagcggcacacgcaaagcggcaagagagggccggcaggcgaggcccgcggaggccgaggcgcccaggcgcgagg

SEQ ID NO: 249783 - RNA, 68 nt, Homo sapiens
gcagagacgccggacaggcgcagggagcaggagaagcggagcgaaggggcgggcaggcagaggcggcg

SEQ ID NO: 249784 - RNA, 78 nt, Homo sapiens
gcgggagggcgagaacgaccccgagacgggacagagcgaagaaccccccaagaagacgaaacccccgggccacaagaa

SEQ ID NO: 249785 - RNA, 62 nt, Homo sapiens
gcaccccacccgggccgcccgaagaggcagacgccagcagacacacagccgggcacagcgcc

SEQ ID NO: 249786 - RNA, 85 nt, Homo sapiens
gagcccgggcacccgcggaccaggcagaaccagaagaaagcaacggaggaaagaacgagaaagaagaaacaagaaaccaacagga

SEQ ID NO: 249787 - RNA, 74 nt, Homo sapiens
gaaaaacaagcagacccggggggggacacgcaagagacgcaccgagagaagcgcagcaccagaaaaaggaaagc

SEQ ID NO: 249788 - RNA, 46 nt, Homo sapiens
ggaaccagcgaaaacaccaaggcccggcgacccccgcgcagggggc

SEQ ID NO: 249789 - RNA, 94 nt, Homo sapiens
ggaaggcaagcgcagcaacaacagagagcacggaggccacaagaggaagcgaagaagaggacgccgccagcgagccagcagggagccagcaacg

SEQ ID NO: 249790 - RNA, 67 nt, Homo sapiens
ggcaagggcgggggaggggaagggcaggcgcccagccaaagagaacagagagcggaaaccaacgccc

SEQ ID NO: 249791 - RNA, 74 nt, Homo sapiens
aaacaaagccgcgagaggaccccccagagaagcggaggcagacgcgcccggagaaggacagcagcgaaaaaggg

SEQ ID NO: 249792 - RNA, 85 nt, Homo sapiens
ccaccccacggacagcaccggaggaccagcagaccagcgcgcacacaagcgaacggcacggaccccgaggaggacgcaacgccgc

SEQ ID NO: 249793 - RNA, 53 nt, Homo sapiens
agggcagaggccggcccccagcggggggggaccggcagacaacacgcggggcc

SEQ ID NO: 249794 - RNA, 85 nt, Homo sapiens
aagaacgcaaaggccaacacggagaaacaggacccaaagcaaagcccggagcgcaagaccgaaaagcaaagaaaaccggaaaaaa

SEQ ID NO: 249795 - RNA, 78 nt, Homo sapiens
ggacaccaacgggaccagaagcaaaaagccgcgcagcacccgcacacagcaccgcgaccccccacaccacagcaagac

SEQ ID NO: 249796 - RNA, 88 nt, Homo sapiens
aagacaccaccagcccaagaaagcaccgggcgaacagaaacagacgccgggggagagagacgcgggaaccgccagcaaaccacacagg

SEQ ID NO: 249797 - RNA, 72 nt, Homo sapiens
ccggacacacccccccaggacccaccggagggccacccagagaacaaagagccggagagagggaccgaagag

SEQ ID NO: 249798 - RNA, 85 nt, Homo sapiens
gcacccgcccgaggacagagaggcgagcgcccggaggggagagagcggaggacagccgagaggagcgccagaggaagaaaaaagc

SEQ ID NO: 249799 - RNA, 81 nt, Homo sapiens
aagcggcgaccccgcggccggccgggcagggccccgagaggcaggcaggggacccggacgcaggagacagagagaaagcaa

SEQ ID NO: 249800 - RNA, 84 nt, Homo sapiens
cgcgagcagagccgcccagcccgccagcgcgccgggacggacccaaagacaggaccacgcaccagcagagaaggaaagcaaacc

SEQ ID NO: 249801 - RNA, 77 nt, Homo sapiens
acacgaagagcgccgcgcgcagagaccccgcaggcaggaaccagagaaggagaaacagcagggccaaaggcaagaac

SEQ ID NO: 249802 - RNA, 104 nt, Homo sapiens
ggggcgagggggaagcgcaacccgacccggaggcgcgaggggcccgggggcagggggcacccgaggaggaagagggcagggcccacggaaagaagggaaacccg

SEQ ID NO: 249803 - RNA, 56 nt, Homo sapiens
cgacggcgccggcggcccgggacccccccgcggcaggaacgcacccggcggcccca

SEQ ID NO: 249804 - RNA, 84 nt, Homo sapiens
agaaaacccgaagagaagaaggaaaaagcggaagaaaacagaagaggcggggagaaagagcagagccagagcccaagcccccgc

SEQ ID NO: 249805 - RNA, 79 nt, Homo sapiens
aaaaaccaaaaaaccaagaacggagaacgaaaaacccaccagcagaggaggccaccagaaacggccagcgagacccgga

SEQ ID NO: 249806 - RNA, 42 nt, Homo sapiens
ccccgcgccgcacggggacgaggacagggcagcccgcggggc

SEQ ID NO: 249807 - RNA, 83 nt, Homo sapiens
aaaggagacacgacacaggggagcaggcggaggcaaggggcagcggaacgcgccgacgccgcaaccagcaccccgaggagcgg

SEQ ID NO: 249808 - RNA, 82 nt, Homo sapiens
gcacgcagcacgggcgcggacaccagcgagagcggaggagcacaggcacgaccaaagagagcagcacgacagcaaccgacca

SEQ ID NO: 249809 - RNA, 76 nt, Homo sapiens
ccgaaggaccaccccgagagccacgacagcgccacccacagaccgccccagcgaggcgcccccgacccagccagcg

SEQ ID NO: 249810 - RNA, 76 nt, Homo sapiens
cccgcgccaaagagaagcggcgagaaaaggccccagggacaaaaggacagcgacagacagcaaacacagccagaac

SEQ ID NO: 249811 - RNA, 70 nt, Homo sapiens
acagaacggccccagcccgaccgcccagggcgaggggcgggcgcacaggggacaggacaagaggaggagc

SEQ ID NO: 249812 - RNA, 79 nt, Homo sapiens
caagagccccaaagcagccaaaaggggagccgccaccaaaagcagacggaaaacccacggggaagaccacaccccgagg

SEQ ID NO: 249813 - RNA, 68 nt, Homo sapiens
agagccaagacggagaaacaacaacccaagcccagcagcgaagagcacccccgacaggagcaaaccca

SEQ ID NO: 249814 - RNA, 72 nt, Homo sapiens
cccaccgggcccgaaggcgcggaagacgggaagccaagcaggacaaccacaaaagcagcaaacagaagccag

SEQ ID NO: 249815 - RNA, 79 nt, Homo sapiens
cgccaggagggagggacccagcagaggccgagggacagagaaaaacacgacagagggaagcagcggaaagcacagggga

SEQ ID NO: 249816 - RNA, 72 nt, Homo sapiens
cacaggcgcaaacaagaacccgggagcgggcgacagaacgccagaaaccgaaggacagggcagaccgccagc

SEQ ID NO: 249817 - RNA, 79 nt, Homo sapiens
gagcgaccccccagaccggccgccccccccccacggcacccccaccagaaggcgaacccaggcacccagagacggagcg

SEQ ID NO: 249818 - RNA, 70 nt, Homo sapiens
cgacgcccacccaaggaacaccaacgagaaaagcagccagcaaccaggagcagacaagggcccacaccaa

SEQ ID NO: 249819 - RNA, 44 nt, Homo sapiens
caaaacaccgggacgaagggggcccaggcaggcacaggagaaca

SEQ ID NO: 249820 - RNA, 79 nt, Homo sapiens
ccggggccagccaggccgcgcgggcccgaggccggaggaacccggacccggcgagcggagcacggggccaaccccggcc

SEQ ID NO: 249821 - RNA, 55 nt, Homo sapiens
ggcggagaacaaggaggaagaggaccccccagaggaggaaacagcggaaccaacc

SEQ ID NO: 249822 - RNA, 101 nt, Homo sapiens
ggggagggggagcggacacagcccccacacaaaaaagggacagagaccagagagagcaccccaagacggcacccgggcccgaggcagaccacaccggaagg

SEQ ID NO: 249823 - RNA, 64 nt, Homo sapiens
acgagaggaagcagccagcgccgcaacaagcggcagcaagaagggagggcaagcagaaagcaga

SEQ ID NO: 249824 - RNA, 82 nt, Homo sapiens
aaggggcccgaacagagggggggaacgaagaaaaacgccagcggaaaggcgaaacgggggaccaagagaccgagaaggacca

SEQ ID NO: 249825 - RNA, 77 nt, Homo sapiens
aggggccggagaacacgggcacacgagcgccagccagaagcggggggcacgcagcgaagccacagaccccagaaacg

SEQ ID NO: 249826 - RNA, 74 nt, Homo sapiens
aagacgcaggagcaaagagagcaaagcagcagcacaccccgacaagggaaggaacccacgcggccaccccccgc

SEQ ID NO: 249827 - RNA, 76 nt, Homo sapiens
ggacgcgcccgggccaaccggggccgagaaccaccacgcgcccagagcgcaggggcgagcccccacccccgcgcgg

SEQ ID NO: 249828 - RNA, 106 nt, Homo sapiens
aagacaaggaaaaggacaaggggaaaggaaggggccccagggcgcagacaaggcaggacgccacaagccaccccagagaagaaaaaggcaaaaacccggagagcaa

SEQ ID NO: 249829 - RNA, 54 nt, Homo sapiens
ggaggaacagacaccgagccagcaagcccccaacggcgggaccaggacggacca

SEQ ID NO: 249830 - RNA, 36 nt, Homo sapiens
ccccaccggaaggaggacaagagcgcccaagcggac

SEQ ID NO: 249831 - RNA, 77 nt, Homo sapiens
agcgacggaaagcccaacccaggaaacccagcggcggcagaaccagccggcacaaagccgaaccagagagagcaacg

SEQ ID NO: 249832 - RNA, 76 nt, Homo sapiens
aagcagcgcccgcgccgggcccggaaagcgccgcccagcagccgcagggccaccagaggaccaagccagacgacga

SEQ ID NO: 249833 - RNA, 117 nt, Homo sapiens
gacagccgaaccccagcggagaggcccgacagaagaaggagaggaggcgggagggcagcagaagggaccagagggaacaaaagaagaaaggaagcaaaaacagaaaaacagacgcca

SEQ ID NO: 249834 - RNA, 75 nt, Homo sapiens
ccagcccccaggagcgggaacaggaagccgccgaagcccagaagagaggggagccgaaggcacaacccagaaggc

SEQ ID NO: 249835 - RNA, 67 nt, Homo sapiens
aacgaccgaaacccaacgagaagagaacaacagaccagggaacgggacacacagacggaggaaacga

SEQ ID NO: 249836 - RNA, 67 nt, Homo sapiens
cccagcagggaggaccgaaagcccagcaacccccaagacggagccagcacgcggccaagacagcccc

SEQ ID NO: 249837 - RNA, 92 nt, Homo sapiens
cacagacccccccgggaacggcgcacacagcacaccgaccgcaacaggacccagagcccgcgcccggccaccacggcccgggcgcccaccgg

SEQ ID NO: 249838 - RNA, 82 nt, Homo sapiens
ggcgcggaggagcgaggcagcgacaggacgggaacggggcgccggccgagcccgggaaaacgacagcagcagcagggccgga

SEQ ID NO: 249839 - RNA, 67 nt, Homo sapiens
ggaaaacaggacaccggaaaacccgaagcgacacaccacccagccaaacccaggcccgagaagaaga

SEQ ID NO: 249840 - RNA, 69 nt, Homo sapiens
caccagaaaaagggaaccagcaggaaaaggcggaaacaaacaaacacaggagaagacacggaggcaaga

SEQ ID NO: 249841 - RNA, 63 nt, Homo sapiens
gccgggggagcggggccccacacccccccgggggggcacccggaggagaagaggcgcggaaca

SEQ ID NO: 249842 - RNA, 70 nt, Homo sapiens
gcaagggagacagcaaccaaccagcgagaaaagccgacgcaagagggaaagcggagcacagccccagcgg

SEQ ID NO: 249843 - RNA, 80 nt, Homo sapiens
aggagccccgagaagcaagagagcccacagagaaaagaagaaacaagggcaacgagaaaagaaaccaaacaaagaagaaa

SEQ ID NO: 249844 - RNA, 105 nt, Homo sapiens
ccccgcaccgggaccccgccccgacggagagagcggaccccacaggcccacagagacaggccccccaacaccacggggggaagaaaggcagagccgggggagcgg

SEQ ID NO: 249845 - RNA, 79 nt, Homo sapiens
ccagaccagcagccagccggcggcacaagcgaccaaacgacccccgcggagacagggacaggagagaaccagcaagggg

SEQ ID NO: 249846 - RNA, 74 nt, Homo sapiens
gaggccacgcacaaaggaggggaacgaacgaggcaggaagaggagaggcggacgcagggccgaacggagaccag

SEQ ID NO: 249847 - RNA, 77 nt, Homo sapiens
gcagacggcgcagacgccccccccggccagccccgggcgcggacggagcggaaccgccagaccacaagaaaagcaga

SEQ ID NO: 249848 - RNA, 70 nt, Homo sapiens
gcggaggagaaagcaccaacagcagcggcagccaagggaagaacagacacagcaccgacacgcgcaaaag

SEQ ID NO: 249849 - RNA, 75 nt, Homo sapiens
gacgccacgcccgcccgggggccaggcaccagggacgggacgggaagcagagccaggcagcgagcgggagcagac

SEQ ID NO: 249850 - RNA, 78 nt, Homo sapiens
ccgagagcccggaccagcagagggccgacggcccgggaggagcggggacacgaggaccccccaaaggccccaaccaca

SEQ ID NO: 249851 - RNA, 57 nt, Homo sapiens
aaccgccaaagcccgggcgcggaagaagccaagcggggaacaagcacccagccccac

SEQ ID NO: 249852 - RNA, 96 nt, Homo sapiens
ccggcagaaggcagccaggagggcgaggccagacgccgcagagaccgggaggcagcaacccagaggccaccgccaagcaaaacaaaaccccaagcg

SEQ ID NO: 249853 - RNA, 78 nt, Homo sapiens
gagagccccaggccagaagagagacccgacgacggaccgcacacggagaaggaagcagagacggggcacccgagccag

SEQ ID NO: 249854 - RNA, 74 nt, Homo sapiens
cggcccggggccgacccggcccgaggggaagcagccaggaaagaagccggaagagaaccaaaaggggcggaaca

SEQ ID NO: 249855 - RNA, 70 nt, Homo sapiens
ggagacagcccagcaagaagcccacgaagagcgagagaaagaacagggcagcaaacggaaagaagcacgc

SEQ ID NO: 249856 - RNA, 76 nt, Homo sapiens
agaagcagcaagcagcaacaccagcaaacagggagaaagcacgaggccagaaggcacgcaggagagagaccaccca

SEQ ID NO: 249857 - RNA, 55 nt, Homo sapiens
aggaagaaagcagcccaggagaaggccccaggcaaggcacgcacgaccgagaaag

SEQ ID NO: 249858 - RNA, 75 nt, Homo sapiens
accggacaagcggaaaaacagccagaacagacagcaaagagccaaccgagcaacagccgggccgcgaagccagcc

SEQ ID NO: 249859 - RNA, 70 nt, Homo sapiens
gcccccgaacggaccaaacaggaacgcccgccagacggaggcagggcagaccggccacgcaacccacccc

SEQ ID NO: 249860 - RNA, 91 nt, Homo sapiens
cgcgagggagccggacgccgccgcccgcacccgcagcccgcgcccgccgccgcccgccccagaaaaagcggggaaggggggcaaaaaaaag

SEQ ID NO: 249861 - RNA, 82 nt, Homo sapiens
ccaccccagcccaaagacacagcgaaaccggaaaccagccccccaaaagggcccgaaggcccacaggacagagcccacagca

SEQ ID NO: 249862 - RNA, 74 nt, Homo sapiens
gagaaggcagcagaagggcgacgagaccaacaagacgagggcgcagcacaggaaaggaaggcaaagccagcccc

SEQ ID NO: 249863 - RNA, 80 nt, Homo sapiens
aagggaacccagacaccagaagcgcaagcagaagcaagggacaagggccacacccccagcaacgcaaccagaggacacag

SEQ ID NO: 249864 - RNA, 81 nt, Homo sapiens
cgggaacagaccaaccgccaaaaaagccaccagcaaaccccccacagcaggaagacaacagcacaagcagcgagcgaagga

SEQ ID NO: 249865 - RNA, 84 nt, Homo sapiens
ggcccccagccgcagccacaacaccggcaggaaccaccaggacagagggaggcaagcaggggggcaaaggaaagaaggcagaaa

SEQ ID NO: 249866 - RNA, 69 nt, Homo sapiens
aagacacgggcccaacaacggagaaaccccccaccagaagccccccaagaccggagggccagggagggc

SEQ ID NO: 249867 - RNA, 47 nt, Homo sapiens
agcggccgaaacgcaaaaccagggaggaagacggccaggcaccacag

SEQ ID NO: 249868 - RNA, 117 nt, Homo sapiens
aagcaccggcgacaggggaagacagacaaggaagaaacccgggagacagccgaagaagacaaaacgaggagcagagaaagacgccccccaaaagaaaacgggcaaaaaaagaacaac

SEQ ID NO: 249869 - RNA, 80 nt, Homo sapiens
gccgcgcgccggcggcaccagaagcagcggaggaagagcggcgggaggggaaggagcagccacccgggcagaaaggccgg

SEQ ID NO: 249870 - RNA, 80 nt, Homo sapiens
ggccagcgacccgcgccagcgcccagggggggaaaccaccgggaagcagagagcaaccaagcaccaccaagcccacagca

SEQ ID NO: 249871 - RNA, 86 nt, Homo sapiens
aaacggggagcacccagcaaagagcccacacaggggaaccgcccaccgcgcccccagaacagggccgacgccaccgccgagcccag

SEQ ID NO: 249872 - RNA, 79 nt, Homo sapiens
gacaggaagaggagggggagccagagcaacacaacacgggaggaaacgaaccacacaccagccaccaagcgagagcaga

SEQ ID NO: 249873 - RNA, 76 nt, Homo sapiens
accagggcgcacgggacccgcccaagagccccaaaaacaccaggaacaacaggaaggccagaagcaggcaacgaac

SEQ ID NO: 249874 - RNA, 74 nt, Homo sapiens
aaacccaaccggaagaagagcagggggagaacagagccacccaagaggaaacaccaaggccaaagcgcgaaaac

SEQ ID NO: 249875 - RNA, 74 nt, Homo sapiens
caggcccaggaacacgcgggaggcggcacacacgacaaaggacagcgccggaagaggagccaaaccaaaggacg

SEQ ID NO: 249876 - RNA, 83 nt, Homo sapiens
acagaggaacagcaagcgaaggacaccggaacgccggaagcacagccggaggaaccggcaacgcaagcgaagaccaaccacag

SEQ ID NO: 249877 - RNA, 74 nt, Homo sapiens
ccgccacggcgccgagccgcggccgagggcacgagggagaggccgagaagaaacagggaacggagcccgcaaga

SEQ ID NO: 249878 - RNA, 56 nt, Homo sapiens
gcggcagcccaacccagaggaacgacccaggaacagcaagccaaagagcggcgggc

SEQ ID NO: 249879 - RNA, 70 nt, Homo sapiens
ggcccacccagccccaaagaccccggcccccacagagcaggaccagcagagcaaggagacccagccgaca

SEQ ID NO: 249880 - RNA, 76 nt, Homo sapiens
agccaagccccgccgacgcgggcaccggagccagccccgcagcgggacaaggcacgaggcgcggcgaccaccacag

SEQ ID NO: 249881 - RNA, 75 nt, Homo sapiens
gcgcgcacccagaaacaggcgaagccaaagcagcacgcgaggaggaaaggcaccccaccagaaccacagccgcca

SEQ ID NO: 249882 - RNA, 71 nt, Homo sapiens
cccccacggaaggccacgagggcggaccccggaggcaagcgccaggaccgcggggggcgagccgccgcgcc

SEQ ID NO: 249883 - RNA, 83 nt, Homo sapiens
caggaggcagagccaaacacccagacggcggaaaacccgaagcagaagcccgacacaggcacaagaccgagcaggcacagagc

SEQ ID NO: 249884 - RNA, 67 nt, Homo sapiens
gggacaaacaggaacagacggaccgccacgaccagaccaacccggacaccaaacagggcagaaaggg

SEQ ID NO: 249885 - RNA, 69 nt, Homo sapiens
aacgcaagggggaagagagagaaacaaaagcgccagagccaagaacgagggccacgaccggcgcgcgcg

SEQ ID NO: 249886 - RNA, 88 nt, Homo sapiens
gcggggcaagcgggccacgcacccgcaccaaggccaaggcaagagcgaaggagaaaggcaacaaggcccgagcggggaacacgagagc

SEQ ID NO: 249887 - RNA, 81 nt, Homo sapiens
agcaccaccgccccggccgcgcaaccgcaccggccgcgcgggcaccaggggccagccggcaacacgccaagaaggagcgga

SEQ ID NO: 249888 - RNA, 53 nt, Homo sapiens
ccgccaacccccaaagcagaacagaaaacgaggaacacgggagcagcgacagg

SEQ ID NO: 249889 - RNA, 123 nt, Homo sapiens
gaaacccaagaaaaagcgaaggaacgcagagcgaagacaagcgccgagaaagaaggcccaaaagagcagcaccccccacagcacggaaagaagaaaaaagcaggcacccgaaacaaaggagac

SEQ ID NO: 249890 - RNA, 80 nt, Homo sapiens
gcgccccacaagaagcggaagaagcgccccgaggaaggccaagcgcccggaagacgagacaacgcaccacagcgaagacc

SEQ ID NO: 249891 - RNA, 70 nt, Homo sapiens
caccgaaaaacacgaagcggggcgacccaaaggcaggaacggaaggagcagagaaacagcacaaggaccg

SEQ ID NO: 249892 - RNA, 80 nt, Homo sapiens
gagaccaagcaagggaaaagaagccggcggagagcggagagggccaacggcgaccgccagccaggaagagcggaacggag

SEQ ID NO: 249893 - RNA, 86 nt, Homo sapiens
cgccagccccgccccgggcaaagcccacggccgccgagcaggagggacaggcaagaaggaagaaggcagaggcgcagccaggggga

SEQ ID NO: 249894 - RNA, 83 nt, Homo sapiens
gacggcgcccccgggcagacaccggcggcgacgaccacaggagagggagacgcgcacggaccggaaccagaacaagacgaaag

SEQ ID NO: 249895 - RNA, 61 nt, Homo sapiens
gcagaaaacaaaaaaagggagaagaagggagccccggcacaaaggaagaagaaagaaggga

SEQ ID NO: 249896 - RNA, 69 nt, Homo sapiens
gccgggacacggggcagcgacccgcccacgcccagcagcagcagcaacaggcgcagccagagaaacagc

SEQ ID NO: 249897 - RNA, 76 nt, Homo sapiens
ggggccagggcaaaggcggacaggacccagcacagcagacaagagcacgacaaggggcaacacgcccagagccagc

SEQ ID NO: 249898 - RNA, 60 nt, Homo sapiens
cccgaaccgagcggggggaacgaggaagaaccgaggaagaagaggaagagaaaagcggaa

SEQ ID NO: 249899 - RNA, 69 nt, Homo sapiens
ccaggaggacacgcagcaaggagagagaaacaacaacagcagacaacccacaggaaaagaaacaaagag

SEQ ID NO: 249900 - RNA, 103 nt, Homo sapiens
caccagaggaaggggcgggggcggccccagcggaaggcgccagagggcacgcgcaagggccgagcggagacggcgaggagaccccacaacggccacgcccacc

SEQ ID NO: 249901 - RNA, 71 nt, Homo sapiens
aagcaaaccggcgcaaagaagacaaagacgcacaccaaagcaggagaggcgaagagccaggaacacccggc

SEQ ID NO: 249902 - RNA, 55 nt, Homo sapiens
ggggagcagcccagccaggaagcgggacgaccaggacacaccacgaggaggacag

SEQ ID NO: 249903 - RNA, 79 nt, Homo sapiens
cggacgcacgcgacacggggcgccacgagcaccagcacgagccgcacaaggccccccaccccaacaacccagcccaaaa

SEQ ID NO: 249904 - RNA, 78 nt, Homo sapiens
cggacccagccccagaacccaggaaaagggagaccaccgaccgcagacgggccggaggagcgcaaaccgaaccgggga

SEQ ID NO: 249905 - RNA, 64 nt, Homo sapiens
agggaggggaaagacccacaccaagaggcagcgccaaaccgggccaacgaccaaaaaaacgagg

SEQ ID NO: 249906 - RNA, 76 nt, Homo sapiens
cagaaacagcaccagccccaaacaaaccaaagagccaggcgacccccgcgcccgaggcccagaaggggacaagcgg

SEQ ID NO: 249907 - RNA, 71 nt, Homo sapiens
ccacccagcaggaccgagccaaagagcggaccagagagacagacaagaaaggagcaggcccaacaggggac

SEQ ID NO: 249908 - RNA, 82 nt, Homo sapiens
cacacacacccaagcgagggacgagagggggacggaagacaacaaggccaacaccgaggagacagagggaccggcagaacac

SEQ ID NO: 249909 - RNA, 73 nt, Homo sapiens
gggcaccgcccaaaaaggcgaggacgggaaaagccagagagcagaagagaagaagggaagaaaggaacaaaaa

SEQ ID NO: 249910 - RNA, 55 nt, Homo sapiens
gagccaacgcgcagaagcccagggaccgacaccagaggacgcccggcagaaggga

SEQ ID NO: 249911 - RNA, 67 nt, Homo sapiens
cggaagccccgaggcagccccgcggaggagcagaagaacacaagcagcgcgaagagaacgccaagcc

SEQ ID NO: 249912 - RNA, 77 nt, Homo sapiens
agagccgcgcaggacggcagcggaacacccccagagggcgccccagaacaaaccagaagcagaagggaggaaaaaag

SEQ ID NO: 249913 - RNA, 81 nt, Homo sapiens
aagagccgagcgcgagagcggccccagccggcggcggccggccgcccagcgggacccgccagacaacaggcacaaagagag

SEQ ID NO: 249914 - RNA, 71 nt, Homo sapiens
gcaaccgccgagagagaggaaggccaccagaaacgccgccacgaccggggcaggaagaggaaaccaaggga

SEQ ID NO: 249915 - RNA, 53 nt, Homo sapiens
gacagcccgcacggaccgggaagagaaaagaggaacacggccaaagccccaga

SEQ ID NO: 249916 - RNA, 54 nt, Homo sapiens
cacgggggggaccagaaaaccccagcaacaagaggacagagcacgccaaaggcc

SEQ ID NO: 249917 - RNA, 72 nt, Homo sapiens
gagagcccagcaacggacccaacagagcacgcaaaggaggcgagaacagagcgagaagacaagcagaagccc

SEQ ID NO: 249918 - RNA, 68 nt, Homo sapiens
agagggaggagaaaacccaaacgagggcacgcccacggaagccccccaaagcgagggacacaagaccc

SEQ ID NO: 249919 - RNA, 62 nt, Homo sapiens
cagcggcgcgagaggaccaccggggcggcccggcggagaagaccggagacccgaaagaggaa

SEQ ID NO: 249920 - RNA, 72 nt, Homo sapiens
gccggacagagacccaacagcagcaagcgaacaccagaggaccaggcagagcagcagcacaaaacccccaac

SEQ ID NO: 249921 - RNA, 82 nt, Homo sapiens
gccgacgcagaagcccgccgcccccaaagcggaaccggacaccgagggcaacggcagaaggccgcgggaaaggcaaaacccc

SEQ ID NO: 249922 - RNA, 81 nt, Homo sapiens
ccgacccccaggcgcggcccccaggagccgcgaccccggacccagggaccagcccacccggaaccacccgccagccccacc

SEQ ID NO: 249923 - RNA, 78 nt, Homo sapiens
cccggccgcggagcgacgccgacggggcagacagcaaaggaaacagaagccgcggcagccaggagccaaggccacccc

SEQ ID NO: 249924 - RNA, 75 nt, Homo sapiens
gcaggaaggccaccacagggccaacaagcagcgagggcccgacaagagaggcggagccacccccacaacggacca

SEQ ID NO: 249925 - RNA, 80 nt, Homo sapiens
ggagaggaaagagacccgcagagccacagggcaggaaccaggaccccgggagggcgggacacccaggaggaagggggcag

SEQ ID NO: 249926 - RNA, 83 nt, Homo sapiens
agggcgcacggcccgcgcacggcccccggaccgcggccgcccggggacgcagcaggaaggagcgccccacccccgaacggccc

SEQ ID NO: 249927 - RNA, 87 nt, Homo sapiens
agccaggaaggaggaggaaaaaaggagcaaaaggaacacaggagcgggaaacgcacaacagagaacagaaaagacccgcagacaacg

SEQ ID NO: 249928 - RNA, 73 nt, Homo sapiens
cgacagagccagcgagcgaaccagaccaaaaacgcaacaacagacggccgcaccgaggggaaacacgaaagaa

SEQ ID NO: 249929 - RNA, 75 nt, Homo sapiens
ggaaaaagaagcacaccgccaaccacccgggcaacacagggacaaaggacaccagacagaaccacacaaaacaac

SEQ ID NO: 249930 - RNA, 80 nt, Homo sapiens
cgcgcccagaagaagggaaggcgcgaggaggaaaggaggacgaggacgccgggcagggccaagagccaacggagaccgaa

SEQ ID NO: 249931 - RNA, 68 nt, Homo sapiens
agagcggagccacaggggggaaggagacgcacacccacaccgggcaacaggccagcaaacaaaaaacc

SEQ ID NO: 249932 - RNA, 38 nt, Homo sapiens
gacaccggaagcgggaaagagcaaaacggaagcccaac

SEQ ID NO: 249933 - RNA, 75 nt, Homo sapiens
gaaggaccaagaaccagaccaagaaaacacggccaaaacaggggaagacgccaccgacaaaaggaaaacaaagac

SEQ ID NO: 249934 - RNA, 73 nt, Homo sapiens
agcccgggcaaggggacgcgcagcgagaacaggcccaaagacgcacccacagagaaacccgacccgcagggga

SEQ ID NO: 249935 - RNA, 77 nt, Homo sapiens
cgcgaggacagaggagagacagcggcaagcggaaaaccaaggaaaagaagagccaggaaccagcggcaaccggagcc

SEQ ID NO: 249936 - RNA, 79 nt, Homo sapiens
cggcgaggccggccaggcgacccccacgggcgggggcgcacaacacagaaaccgcaccagggacagcagaaacaaaagc

SEQ ID NO: 249937 - RNA, 84 nt, Homo sapiens
aaggcaaagaagaccgcaaagagcgaaagcaaccggaggacggcgggcccggaaggaacgcccggaaggccgcggaaaccgacg

SEQ ID NO: 249938 - RNA, 76 nt, Homo sapiens
gacggcacaccccaggaaccaggaaaggaaaaggaaaacaaagagggaaaacggagaaaagcccccccaggccagc

SEQ ID NO: 249939 - RNA, 62 nt, Homo sapiens
cgagacacggcagcaggcgcgcgccccccgagcaggagaagagagagcaggagcggagagga

SEQ ID NO: 249940 - RNA, 57 nt, Homo sapiens
gagcaggaagcgcggcgagcggggcgccccagcccagcagagagacacgcacaccag

SEQ ID NO: 249941 - RNA, 80 nt, Homo sapiens
aaggagaagacccgggaggggagaaagacagcgggcccccaggacagggcagaccgccagcagcacagcaagccacagag

SEQ ID NO: 249942 - RNA, 74 nt, Homo sapiens
ccaggacgaaccggaaaagagccgccagcgccgcccggcacacaaccagaacggagacaggaaagaaaacgcag

SEQ ID NO: 249943 - RNA, 77 nt, Homo sapiens
acccccaacaccagcaccgcagaggcaaggggccaccaggaggccagggggcgccagaggggagcccaaaagcacga

SEQ ID NO: 249944 - RNA, 87 nt, Homo sapiens
gccccgcgcgcggccggcggcccaggcgcacaccgcgggggcacccgaggaggaagagggcagggcccacggaaagaagggaaaccc

SEQ ID NO: 249945 - RNA, 77 nt, Homo sapiens
caccggcgacacagcaacacggccgaaaccccaagcaccaccaccaccccggaaaccaggggcaagaagaaacgcac

SEQ ID NO: 249946 - RNA, 76 nt, Homo sapiens
gacggcggccacaaccaccccacagcgcccaaggggcggcccacggaacgagggcacccaacagcgccccgagggg

SEQ ID NO: 249947 - RNA, 73 nt, Homo sapiens
accccagccgacgggccggaccgccgcgccccccaacgaccaggccccaacaacacgcgcaggacagcaggcg

SEQ ID NO: 249948 - RNA, 55 nt, Homo sapiens
aagcacagaccccggaaacacccaccaccgaaccaggagacaaggagagagacga

SEQ ID NO: 249949 - RNA, 69 nt, Homo sapiens
acgcgacaagcaacaaaaagcagaaccagacaaggaggagcaagacagcaacgcacacggaaggcagcc

SEQ ID NO: 249950 - RNA, 71 nt, Homo sapiens
aggcggcgccgcgaaagggccgaacgacaggaacagaagacgggacaggaaaggcaggagcaagggaaaac

SEQ ID NO: 249951 - RNA, 81 nt, Homo sapiens
cagaaaccacgcgacgaaacgccacaggaccccacacagcagaacgcagacccagcagcccagcgccgagcgcagggacag

SEQ ID NO: 249952 - RNA, 71 nt, Homo sapiens
aacgggaacaaaacacacacccgcagacaagaacggagaggaagaagagagggcgaaggaggccacacaga

SEQ ID NO: 249953 - RNA, 74 nt, Homo sapiens
gagccgcaggaccggaggacaggaaaaggcagaaaggcccggaacacaaaacaggaaaagacccagcgacaacg

SEQ ID NO: 249954 - RNA, 50 nt, Homo sapiens
ccaaacccaaagaggaagcacaggcgggaaaacggcacaaggcgacgagg

SEQ ID NO: 249955 - RNA, 87 nt, Homo sapiens
cccaaccagacgcagagccggggcaccacaacgacacacccagcccaggagaccgaggggagacagcagcaccagcggggcagagac

SEQ ID NO: 249956 - RNA, 77 nt, Homo sapiens
gacgcgcacaagcccaggagaaacaacaagaggaacacggagacagagccaaggcgagcgcaacagcagggacaaaa

SEQ ID NO: 249957 - RNA, 60 nt, Homo sapiens
acggaagggggcacaaggcggcggaggaggaagagaccacaagcgaaccaaaggcagagc

SEQ ID NO: 249958 - RNA, 78 nt, Homo sapiens
ccgacgagaaaacgcaagacagcaacacacggcgccgaccccgacagaacgggccccgcacccgcggccccggggcag

SEQ ID NO: 249959 - RNA, 73 nt, Homo sapiens
cacagaacaacagaagaggagagaggaacccgaagaagaaaggacgacagccagagaggaaacccaagaagaa

SEQ ID NO: 249960 - RNA, 64 nt, Homo sapiens
agcagccagccccagaccccaaccaagggccagcaccccaagccaggccagcccaggggaacga

SEQ ID NO: 249961 - RNA, 77 nt, Homo sapiens
agaacggcgggaagagaagacacgagcacaaacgaaaggggagcaagaagaaagagcagggaggagggagcgacagg

SEQ ID NO: 249962 - RNA, 74 nt, Homo sapiens
gcaaccaagagggaaggagacagggaagcaaagcgcaacagaaacagagagagacgcagggggggagcggcagg

SEQ ID NO: 249963 - RNA, 76 nt, Homo sapiens
aagaaacagacagaagggaggcaaagaaaaggagaaaagaagccaaagggacacgggaagcgcccgggaggcgcag

SEQ ID NO: 249964 - RNA, 82 nt, Homo sapiens
ggaaagcacgcgcacagagggaaaagaacggaggggagcccgagacgcgaacagaaggccagaagaggcggggagaacgcgg

SEQ ID NO: 249965 - RNA, 83 nt, Homo sapiens
acgcgggagacgccagcgagcgggaggagcccgcggagggcaccacacggcaacaggcgacgggcggccaacacacagacgcc

SEQ ID NO: 249966 - RNA, 75 nt, Homo sapiens
gaacgacaaaggcaaggccgagaggagagggacgagcaggcaggagaagggcaccggggaggaccgcgcgacgcg

SEQ ID NO: 249967 - RNA, 81 nt, Homo sapiens
ccgccggagcgcaagcgccgcccacacgccaggccagccccacggcgcagccagaagcacaagggcagcagccggcaacag

SEQ ID NO: 249968 - RNA, 78 nt, Homo sapiens
ggacagcgcacacagcaagcacgagggcgcgacaagagacggacaaaaagacgagagggaaggccaggccccaggccc

SEQ ID NO: 249969 - RNA, 82 nt, Homo sapiens
ggcaggaacagacacggggaagcgcaaaaacaagacggggcgccccacagaggggcgacgaaagcggagagggccgccggac

SEQ ID NO: 249970 - RNA, 73 nt, Homo sapiens
acgcaggcaacaacaggaagggaccacagaccagcacgccggcgccacgaaccgagcgacaggacgggccgag

SEQ ID NO: 249971 - RNA, 80 nt, Homo sapiens
agcccacagggcaaagagagcagacccgaggagcccgcaggaaggagggccccggagcagccacaccaccgaggccccac

SEQ ID NO: 249972 - RNA, 53 nt, Homo sapiens
aaaaacaggagccacccacgagaaaggcgccacacggaccccccgaaaaccag

SEQ ID NO: 249973 - RNA, 70 nt, Homo sapiens
gcaagaaccgacaagccaccggcggaaagcgcagaccagagaggacaaccaaaagcaccgaaccggaaca

SEQ ID NO: 249974 - RNA, 74 nt, Homo sapiens
aaccagaccagagaggagacagcagacgcaccaaagggacagaaccaaaggacgcaacacagcaaccaacccca

SEQ ID NO: 249975 - RNA, 86 nt, Homo sapiens
ggccaaggaggccacaacgggagcaggcgccagacgagcacggaagcacaagcagggaggagcggcaggagaagcaaagcaggaaa

SEQ ID NO: 249976 - RNA, 79 nt, Homo sapiens
gccaagccggcggaggacgagacaggaggaggaacaagaggagacaacgaagagaggaaagaagcggaaaggagggagc

SEQ ID NO: 249977 - RNA, 73 nt, Homo sapiens
cccaggaggagcaaaggaacgaacccagcaagggcgaaggacagaacacaccgaaaccaccaaaagaccacaa

SEQ ID NO: 249978 - RNA, 76 nt, Homo sapiens
cggcgcagcccacgccagacgaccccacccgcgccgcgacccgcgccgagggcaggggggaccagagccagcggac

SEQ ID NO: 249979 - RNA, 93 nt, Homo sapiens
ccgcccccgcgggcgccgggccaggacgggagcggccccagcgcacccgaagcggcagcggaaggagcgcacccccggagaagccaaggggaa

SEQ ID NO: 249980 - RNA, 40 nt, Homo sapiens
cggcagagcaagagcacgaggcggggacggacagccagga

SEQ ID NO: 249981 - RNA, 78 nt, Homo sapiens
gaccaaaagaagcaaagagccagggacacagagcagaagcgcggacacccagaagaaccgaacggaaggggagcccgg

SEQ ID NO: 249982 - RNA, 77 nt, Homo sapiens
gccggaggcccgaccccagaagagacccagaaagggcaggggccaaggcgacagcaaaacggagaaagaggagaggg

SEQ ID NO: 249983 - RNA, 76 nt, Homo sapiens
gggcaaagacgacgcggagaggaacagcaaaaggccgcaccagggagggaagaggggaaaggagcagccaaagacg

SEQ ID NO: 249984 - RNA, 65 nt, Homo sapiens
aaaaaagaggagcagcaggcacagcacgggcagagccagccaacagcaggcaggggcgcacccag

SEQ ID NO: 249985 - RNA, 84 nt, Homo sapiens
agcaacggcggccccaggcccaggccccccaccaccagaggcaagacagccggcaggaacagacgccccaccaggccagcgggg

SEQ ID NO: 249986 - RNA, 89 nt, Homo sapiens
cggccggagaagccgacgaagaggcagaaggagcaggccgcgggaggggagcaccgaagagagccagcagcccgggaccgggagcccgg

SEQ ID NO: 249987 - RNA, 79 nt, Homo sapiens
gcccaaccacccccaaggggcgcacaaaaaaggcaggggcgacaggcagagggccccagaacacggcaacgcaggcacc

SEQ ID NO: 249988 - RNA, 77 nt, Homo sapiens
gccaagccgccccccaccgcccgggcccgaggaggcagccaagccgggccgcccgcggcggacagcacacccgacag

SEQ ID NO: 249989 - RNA, 80 nt, Homo sapiens
ggaggaaccgcgcaaaccacccaggaaggaccgagaccccacaagacgcaccaacgcaaggaaacacacgaacgccggag

SEQ ID NO: 249990 - RNA, 85 nt, Homo sapiens
cagacacaagccagacccaggagagcaaggcccagaaagagaacaaggcagaccaaccaccccaccgggccacgacagccaccaa

SEQ ID NO: 249991 - RNA, 78 nt, Homo sapiens
agccggaccccgacacgcgccgcggccacaccccaggagcagccaccaagggagccccagcgagccagagggacagca

SEQ ID NO: 249992 - RNA, 81 nt, Homo sapiens
ggccgaccgagacgggcggagaggagaaggacagagcgggagccaccagcgccaaagggaagccaggagcccgggggcacg

SEQ ID NO: 249993 - RNA, 70 nt, Homo sapiens
ccaccggccccgggccagcggaagcccgagcagccacccgaagggaagaacgaggcaagggaagaaacca

SEQ ID NO: 249994 - RNA, 78 nt, Homo sapiens
gcagcagcagcagcgcaggccaaggaaaaggagacgaggagcgaagcagagagagacacgaaagcgaggaggccgggc

SEQ ID NO: 249995 - RNA, 78 nt, Homo sapiens
agcccccagagcgggaccacagaaacggcagacagaacagaagcggcccacggcccacacgaaccccgggacacgaga

SEQ ID NO: 249996 - RNA, 43 nt, Homo sapiens
gacccgcaccggaaggccacgccaagcacggggcaccgggccc

SEQ ID NO: 249997 - RNA, 94 nt, Homo sapiens
agcccgacacaggagcgggcagaggagcagggaggccacaggggccgacaacacagagcaagggaagaagaggagaacgaacggagaccaagag

SEQ ID NO: 249998 - RNA, 69 nt, Homo sapiens
aacacccgccaacagcaaagcccacaaggccaaggccacagccaaaaacaagagaccacccaacagcga

SEQ ID NO: 249999 - RNA, 46 nt, Homo sapiens
acgcagacggcagggggaaaagaccagccaaggcccccccacaagc

SEQ ID NO: 250000 - RNA, 82 nt, Homo sapiens
cggggccgagacggacgacccgagcaacccccagagcaggagggacagaggccagcgcgaaaccaagaagcgccaacacaga

SEQ ID NO: 250001 - RNA, 76 nt, Homo sapiens
cagaagaggagagagagcaagagaggaagaagaacgacccgcccggggcagcaggcaaaagcagaccggaaaaccc

SEQ ID NO: 250002 - RNA, 78 nt, Homo sapiens
aacgcgcagagggaaaccacaacagaaggacggaaagggcaaaaagacggggcggacccagagcgaccaggcgcgcca

SEQ ID NO: 250003 - RNA, 76 nt, Homo sapiens
ggccaaaacccaggaggaacacgggaccaccaggaaagggcagcggaggcagagccgaagaaagcaacgcagagac

SEQ ID NO: 250004 - RNA, 87 nt, Homo sapiens
agagcacgacggaccaagacgagcccagcgcaaccccaagcgcccaaaggacccaggaggcccacgggagccccagaacagcacaac

SEQ ID NO: 250005 - RNA, 84 nt, Homo sapiens
acgggcggcagcaaggaagaggacaggagggagaccgcaacgaaaagcagacgaaaggacgacccgacggacgagcggccgagg

SEQ ID NO: 250006 - RNA, 86 nt, Homo sapiens
gggagcaaggaacaccgacaaaccgaccgaccaggagccacagaaaaacaaccaccagcgagcaaaaaggcaaagaccaagaccac

SEQ ID NO: 250007 - RNA, 78 nt, Homo sapiens
gccgaggccagggcagacccggcgggagaggccaagcgggaccgccagaacaagaagaccgcaagcaaaagggacagc

SEQ ID NO: 250008 - RNA, 73 nt, Homo sapiens
accgcagcgcgcgcggcccacggcgggcgcgcccagagggcggagagccaggacgcccagggccccgcgaagg

SEQ ID NO: 250009 - RNA, 82 nt, Homo sapiens
gcgccccccccgcccagagcaggcggcagcagccgccgagggcgccgccaggagccaaaaaccgaacacccggaaggggaca

SEQ ID NO: 250010 - RNA, 57 nt, Homo sapiens
gagcccagcgcaaccccaagcgcccaaagaacacacgcaggacgaaagagacaaaag

SEQ ID NO: 250011 - RNA, 75 nt, Homo sapiens
cagcaagacagaaccgccaaagcgcgagccggacgagcgggagaggacaccacacaaaaaacaggaaaagagaac

SEQ ID NO: 250012 - RNA, 80 nt, Homo sapiens
ggacgccaacgcacccccgacaaacaccacgagaaccgcagcccacacgcggcagccaggccagccagacccaggaccgg

SEQ ID NO: 250013 - RNA, 81 nt, Homo sapiens
gcaacgcgggcagaggagcggagcggagaagccaaggcaaaaaccccccacgaaagaaacggaggccaggaaacgagagca

SEQ ID NO: 250014 - RNA, 54 nt, Homo sapiens
gacaggaggagacaggcgagagaggaggacacgaccgggcaggcgccgggaggg

SEQ ID NO: 250015 - RNA, 76 nt, Homo sapiens
cagagagcacaacacggggacgggccagcaagacacaggagccgcccgcagcgaggagccggagcgcacagagaag

SEQ ID NO: 250016 - RNA, 68 nt, Homo sapiens
aacagagcaaggcggcgggggagaaggcgacccaaagcacccaagggcacaagcccaccacacggcag

SEQ ID NO: 250017 - RNA, 82 nt, Homo sapiens
cagaaaaagccaaaaggcggacggcacggggcggggacgcacagcgggacggcaaggagccggagcccacggagaggcccgg

SEQ ID NO: 250018 - RNA, 84 nt, Homo sapiens
gcccggaccggccgagaggaagacgagccgggaggaacggcccggaaacaggaggacgaaccaaccgggagccccccaagagac

SEQ ID NO: 250019 - RNA, 71 nt, Homo sapiens
caacaccggacaccggacccaggcgaaccaggggggaagaagagcgacaagaagacccgacagagcgaccc

SEQ ID NO: 250020 - RNA, 58 nt, Homo sapiens
gaacccaaaagccgacaaccccagaaacaggaggagagcaaaagacaacacccagaaa

SEQ ID NO: 250021 - RNA, 78 nt, Homo sapiens
ggaagcaccacacggcaacaagaccacccaacaggaacccgggccacggagcaaggcgaagacagcaggaccccaaaa

SEQ ID NO: 250022 - RNA, 70 nt, Homo sapiens
cagccccccccgaccacacaccagaaccggaggaggaccgcggagggaacaccggacagaagacgcccca

SEQ ID NO: 250023 - RNA, 82 nt, Homo sapiens
gcgcggcccgggcagccgcgccccaacaagccgagaccaccaggagcagagcggaggcaaccagccaaaacaacggaaaaca

SEQ ID NO: 250024 - RNA, 118 nt, Homo sapiens
agacccgcgcccagcgcccggcggacaccgagaagcgaccgcgagaaagacgaagagagagagcccacccgggacgggccggcagcgggagccaaaggcggacagcagaacgggaaag

SEQ ID NO: 250025 - RNA, 70 nt, Homo sapiens
gggcgagaagaagcagaaacacagaccacacaagcgcgggggcgcggagggccccccaagcccacccaca

SEQ ID NO: 250026 - RNA, 86 nt, Homo sapiens
aggccacgccgcccaggagacccccgcgcaccaccagccgaggccgccggagccccagacaccccccacacaccaccgacgcgcac

SEQ ID NO: 250027 - RNA, 79 nt, Homo sapiens
agaggccaagaaaacccccgcacggaaggagcaagagacagggaacaccgcacaaccggaggagaaccacaaagaagaa

SEQ ID NO: 250028 - RNA, 39 nt, Homo sapiens
aggcaacgagaaaacacccacgcgaagcgagcaaaggcg

SEQ ID NO: 250029 - RNA, 82 nt, Homo sapiens
agaaggagcccaagagcaggaaaagcaccagagagaccagagggcggaaggaacagaaaggccggggggggcacagagcccc

SEQ ID NO: 250030 - RNA, 76 nt, Homo sapiens
ccgaagggccccaggaggagccaacgacgccgcccacaccgcgagcgccaacacaccacagagcaccagaagggag

SEQ ID NO: 250031 - RNA, 74 nt, Homo sapiens
gaaaacagcgaaagagagaaaccgcagccgaacacaaccccagagccggcagcgggccccccgccgcggcccac

SEQ ID NO: 250032 - RNA, 85 nt, Homo sapiens
gcgcgcggaggcgggagcgcggaaacggaaccgggaggcgacgcacacgagcggaggcgaaggcgccgaccccgacagaacgggc

SEQ ID NO: 250033 - RNA, 96 nt, Homo sapiens
aaaaacggagagccacaaaaaaggaagcgaaacaaaagacgagaggaccgacaccagagcagaaggcagagcggagaaggagcggaggaggccaac

SEQ ID NO: 250034 - RNA, 84 nt, Homo sapiens
ggacggcaaagccacgccaccccgaaccgagccgaggaacacccaccagcccacgcccacgcaaaggcagggcggggggggaga

SEQ ID NO: 250035 - RNA, 74 nt, Homo sapiens
ccacgaggaaaggaagacgggcggagcgccacagccaggagacacgggaggacggacacgggaggccgcgggcg

SEQ ID NO: 250036 - RNA, 84 nt, Homo sapiens
gccccgcgcgcagcccccgccgagccgccccgagcccgccgccacacccgaggccccgggggcccgggaaggccaccgccccca

SEQ ID NO: 250037 - RNA, 70 nt, Homo sapiens
acaaaccagagaagccggcgagacagccgaacgccggaagcacaaggggagcgcaaccccagaagacgca

SEQ ID NO: 250038 - RNA, 72 nt, Homo sapiens
aaggagaggaacaaagcacaaaagcggaagggaacagacacaagaaggacggagaagcgaaagccagaccgg

SEQ ID NO: 250039 - RNA, 66 nt, Homo sapiens
gcccaaaaaggcaaagaaaccacgagagaagagacaaggacaccccaagacgcacccccggagcca

SEQ ID NO: 250040 - RNA, 86 nt, Homo sapiens
gagcaaggcacagagcccggagccaacagcagacagcggaggggagcccgaggagccggaggcggagaacaagcacaagccccgca

SEQ ID NO: 250041 - RNA, 63 nt, Homo sapiens
ccagagacaaaggccagcagaagggagccccacagacacgggcacggcaaacagggcacaaac

SEQ ID NO: 250042 - RNA, 83 nt, Homo sapiens
agcggcgcggggcccgcgggccgggccgggggaccgggcgcagccaggaagaacagaggggagcggaacacaaggggcacacc

SEQ ID NO: 250043 - RNA, 85 nt, Homo sapiens
gcggagggggcccccgagaccccgcggacccaggccaggcagcgcggaggggcgagccagcggccaggacagggggacagcagca

SEQ ID NO: 250044 - RNA, 57 nt, Homo sapiens
cagcaagggccaacggaagccagagaaaggcggagaaaagggacagggaagaaggga

SEQ ID NO: 250045 - RNA, 35 nt, Homo sapiens
cagaacagcagaaggaccaggacacagaccggaaa

SEQ ID NO: 250046 - RNA, 62 nt, Homo sapiens
aaagcacgaacgccgcgggaagaagggccagaaaaaagaggaggacagcaagacgacccgca

SEQ ID NO: 250047 - RNA, 81 nt, Homo sapiens
agcaaaggaaagggggaggggggaagacagggcccagcaccacaggacgggccgggaagccgccagcagggacagccggga

SEQ ID NO: 250048 - RNA, 37 nt, Homo sapiens
ccagcccgccggcggcggcggggaacggaggaacaac

SEQ ID NO: 250049 - RNA, 76 nt, Homo sapiens
aaagcggaaccggaagaaaagcaacggaaacacaagcgccaagagagggaaagggcgggggcaagacccagagaag

SEQ ID NO: 250050 - RNA, 80 nt, Homo sapiens
cccgcgcccgccgcgggagagaggacccccccccccccccaagagcggcgggaggggaaggagcagccacccgggcagaa

SEQ ID NO: 250051 - RNA, 74 nt, Homo sapiens
gcacaccaaagcaggaggcaggcgaagaagaaggaaaccaaaaccaaggcgcgaagacagggaaacagcagaca

SEQ ID NO: 250052 - RNA, 84 nt, Homo sapiens
gccccgcccgcgccggaagagccacgccgaaaggggagcaagaagaaagagcagggaggagggagcgacaggaagaaagaaacc

SEQ ID NO: 250053 - RNA, 79 nt, Homo sapiens
cccaggcgaagaagcgcagccgcaccggccaaggcaagcagagcccggacaggcccgccaccggggcacgggcgccccc

SEQ ID NO: 250054 - RNA, 62 nt, Homo sapiens
gccggcagaggaccaggcaccaccggccccggaagggacccgagaggggcggggagagggcg

SEQ ID NO: 250055 - RNA, 73 nt, Homo sapiens
gacgcaaaccaaggacggggaccgcacacccaagggggaacagcaaggccaggacggacaaggagaacagaaa

SEQ ID NO: 250056 - RNA, 88 nt, Homo sapiens
gacacacccaggaagcagccagaccaagaacaaccgcggacacggagaggaaggggagaccgaaggaccaccggcagcgggaaaaaac

SEQ ID NO: 250057 - RNA, 62 nt, Homo sapiens
ggcgcgacccacacagacaacagccggggcagcgcggacacagacaggcaggagaagaagga

SEQ ID NO: 250058 - RNA, 60 nt, Homo sapiens
ccacagaaaaacccagaacagccccagggccacgaaagggcagcaagacacgaagccgag

SEQ ID NO: 250059 - RNA, 81 nt, Homo sapiens
ggagacccgaagaccagcaggaaagcaggagcccacagggcggagaacggaaaagcaccaggaagcagagaggaccgcaga

SEQ ID NO: 250060 - RNA, 82 nt, Homo sapiens
cgccggcggacgcacccggacgcaaagcgcacggaaggccagccaggacgccccccccgcgggcagcagccgagcagcacgg

SEQ ID NO: 250061 - RNA, 68 nt, Homo sapiens
gagaaggcgccgcggagaccccgcggcccggcagggggaacgggaggggggcgaacaagaggcgccag

SEQ ID NO: 250062 - RNA, 75 nt, Homo sapiens
cgggggccgccgggacccggccaccagcaagccggaagaacgaagcgcgcagaaaacacagaaggcaaaagcgca

SEQ ID NO: 250063 - RNA, 54 nt, Homo sapiens
aacaccaaacgccggacaaccgggagaccggaacccccaaaacagaccagcgag

SEQ ID NO: 250064 - RNA, 71 nt, Homo sapiens
gaccccaagacggccacggaggagaccacaaacagccacaaggggagcccagcagcgacagcggcggggag

SEQ ID NO: 250065 - RNA, 80 nt, Homo sapiens
cagcccgagcaagaacacacaggagagaggaggaaaagcgaccagcaagaagaacgcggagacaaaagcagagaaggcga

SEQ ID NO: 250066 - RNA, 81 nt, Homo sapiens
ggaaaagcagacccaagcggagggcgacacgagaacaaaagggaccaagaaaggcccagggaccaaagcccggacaaggcc

SEQ ID NO: 250067 - RNA, 73 nt, Homo sapiens
cggacccccccaccacccccaacgaaagacgggagcaggccaagcccccgcacgagcaggaggagaacggagc

SEQ ID NO: 250068 - RNA, 62 nt, Homo sapiens
aaaaacccgaccaagcaggcagggggaggaacgcaagcggggagaacagaaaccagagagga

SEQ ID NO: 250069 - RNA, 80 nt, Homo sapiens
cgagccgagcggagccggcggagcccggaacacccgggcgcgccgaggggccgggagcccaaccgaggccggagagaacc

SEQ ID NO: 250070 - RNA, 78 nt, Homo sapiens
acgcccagggcccagagaaccagacaccgccggaagagcgggccaggggagggaagcacggaaggacagagcccgccc

SEQ ID NO: 250071 - RNA, 81 nt, Homo sapiens
acccagccccccaggagcgagacacaggccacaggaacgcgccgaaacacgcaccaccacccccccccaaggccacagccc

SEQ ID NO: 250072 - RNA, 73 nt, Homo sapiens
ccgggagaaaaaaccaggcgaggagcaaggcgcaacgggacacaccggcgggcacgagggaaaaggccaacca

SEQ ID NO: 250073 - RNA, 41 nt, Homo sapiens
caccccgaggcccgacccaggccccagggaaaggaccgagg

SEQ ID NO: 250074 - RNA, 72 nt, Homo sapiens
aggacaccggaccccggacgcgggaaaggggaggcgggggagcgcgggcgagccaagcagcgggcggacgcc

SEQ ID NO: 250075 - RNA, 76 nt, Homo sapiens
gcaaagcgcccgcgcgaccacgggcccggcgccggcccccgccgcccgggaccaaaagccagccccacggaggaac

SEQ ID NO: 250076 - RNA, 74 nt, Homo sapiens
cccacaacccacaccagacggacagccaagcacgcccaagacaggaacccgaaacgggacaaggaaaggaaaaa

SEQ ID NO: 250077 - RNA, 74 nt, Homo sapiens
gagcacgggcggagcgaacggaaagaccacagcaagaccacgcccccagccgggggaccaggccgaacgacccg

SEQ ID NO: 250078 - RNA, 78 nt, Homo sapiens
ggggaggagagagcaagcagggaaagagagcgccagggcagcagaggcccagaaacaaagacgcaaacgaagggagaa

SEQ ID NO: 250079 - RNA, 72 nt, Homo sapiens
acgggcggacgcagcgcgccccagaagaagacacaaccggcacaagacaacaggaccccccagaaacccagg

SEQ ID NO: 250080 - RNA, 81 nt, Homo sapiens
agacaccgggagcgcagcgggggggagcggcaaaacggaggaggcagggagagagcaccggacacagccagcaggacgacg

SEQ ID NO: 250081 - RNA, 69 nt, Homo sapiens
ccagaggaagcccacacacgccagcagaccaccccgggagggaccgcaacgcccggggccccgcagccc

SEQ ID NO: 250082 - RNA, 57 nt, Homo sapiens
acaggcccccggagggaggcacccgagggagagcgcaccaccccacgcgccaggcga

SEQ ID NO: 250083 - RNA, 74 nt, Homo sapiens
cgggaggacggaaagaagaagaccagcagcgaaaacggaaacacaagagaccagagaccggaccaaaccagaga

SEQ ID NO: 250084 - RNA, 76 nt, Homo sapiens
aaagggaggacgacgaaagacccgaaggcaaaggccggacagacgagcccccaacggaacccccacaccccaacca

SEQ ID NO: 250085 - RNA, 84 nt, Homo sapiens
gagacgggcggccggccgacccccgcgcgacggcgacgcgggaggccaggacccccagcacggggccccccaagaacagcacag

SEQ ID NO: 250086 - RNA, 75 nt, Homo sapiens
gggaaggcgcccgcgccaaagcgaggccaggaacgacacaaggggaagcgaaaccggagaaggacaccgggagga

SEQ ID NO: 250087 - RNA, 104 nt, Homo sapiens
aggaagaaaagacaagcggcaacgggccaacccaaagaagacagccaaagaagcagacaccagccccaaacggcaagacaccaccaaaggaagaaagaaggaaa

SEQ ID NO: 250088 - RNA, 115 nt, Homo sapiens
agggcgcgcggccgcaagaggcagaccccagaacaccgaaaaggaaaccccaaagggaccacgccccaccagcaccggcaaccccggcggccaacccaccgcaacaggagggagg

SEQ ID NO: 250089 - RNA, 72 nt, Homo sapiens
acaagagagccagagcaacgcacaagaacgaaaccggaaccagacagaagacaacgaagagaggaaagaagc

SEQ ID NO: 250090 - RNA, 82 nt, Homo sapiens
gggcagcggagacagagcgagggagcaagagggcggaggccacgaacacgccggagccgccagcccggaaaacagaaaccag

SEQ ID NO: 250091 - RNA, 73 nt, Homo sapiens
aaacaccaggcgcggcggcccagccccgacacagggggacaggagccaggccaagagaaagaaacacagaagc

SEQ ID NO: 250092 - RNA, 71 nt, Homo sapiens
acccagggagagcagggcagggaaaagcgccgggcggaccagcaggacaccaggggagaaacgagaaacaa

SEQ ID NO: 250093 - RNA, 81 nt, Homo sapiens
gcgggccgacgggggaagccgaaggacacagacaaggcgccccgcagcgcaagcacgccccccggacagaccacccagccc

SEQ ID NO: 250094 - RNA, 80 nt, Homo sapiens
acgagcaggcgagccgaggaaaggagaaacccaaacaaagcccaggaaagagaccgaaaggacagaagaaaggacaggca

SEQ ID NO: 250095 - RNA, 59 nt, Homo sapiens
acgcagggcgcccccgggacgggaccggaaggacgagaccggggcagaggagggagaaa

SEQ ID NO: 250096 - RNA, 69 nt, Homo sapiens
cccaagcgggggggaccacacggccgcgccagggccagcacagacagacgcagccaggcccggggccaa

SEQ ID NO: 250097 - RNA, 80 nt, Homo sapiens
ggcggggccccgcacagagagccgaggcgccccgcgggagaaggacccccgcgccgcgacaccagccacaggaacgacga

SEQ ID NO: 250098 - RNA, 90 nt, Homo sapiens
ggcaggggcggccggagccgcggccacccagcgagaggagaggcgcccccggggacgaacagaaaggccccggagcagcgcgacccccag

SEQ ID NO: 250099 - RNA, 77 nt, Homo sapiens
aaagcggccccccccccacaaaggaaaggggaaaagccagcgaaagggaaagaaacacccggaaaagcaaagacacg

SEQ ID NO: 250100 - RNA, 84 nt, Homo sapiens
gaaaaaggagcaggcgccagcaaagagaagggaaccgaaccaagaccaccggccacacaagccagcaacagcaagaaacaagca

SEQ ID NO: 250101 - RNA, 82 nt, Homo sapiens
ccccgccagcagccgccggagccagccaacgagcgcaccagaaaggagcaggcaggaagacagaacggcagcacggaaagag

SEQ ID NO: 250102 - RNA, 71 nt, Homo sapiens
ccaggggagacaggccgccgagccggagacccccggcgaagcaggggccacagaccagaagcagcaaggca

SEQ ID NO: 250103 - RNA, 58 nt, Homo sapiens
gcaaccggaccccaaaaaccgagaggggcccgagagaagagaagagcggaggaacagg

SEQ ID NO: 250104 - RNA, 74 nt, Homo sapiens
ggcacccagagcagggaggaacggcggccaaagcgccagacaagggccgagccccggagagccccccgcaaggg

SEQ ID NO: 250105 - RNA, 72 nt, Homo sapiens
caccacgggcggacgcagcgcgccccagaagaagacacaaaggggagacgcagcgagccggccccgagggga

SEQ ID NO: 250106 - RNA, 81 nt, Homo sapiens
cagaagaaggaacagaccaacggacaagggcgcaaggcagaggacaacagcaaccaagaagacgagcaccccccgcaccga

SEQ ID NO: 250107 - RNA, 82 nt, Homo sapiens
ccagaccaaggcccaaacggaccgggccaaggagggccagaccacaagccaacacgcagaggcgaggaaccgcacaggagag

SEQ ID NO: 250108 - RNA, 74 nt, Homo sapiens
cgcaacaagcaggagcacaagaaggcaaggggacgccccagcccaaagcagcaggaaggggaagacacagaaaa

SEQ ID NO: 250109 - RNA, 82 nt, Homo sapiens
ccagacagcaagagcacccgacccacaggccagagagaaagcaccgggaggaaagagagccacacgaagaacacggccaaag

SEQ ID NO: 250110 - RNA, 77 nt, Homo sapiens
cccagagagcgggggggggaccgccggcacgcgacccccccgggcccaaaggacaagagaaaaaaagggcgggcgaa

SEQ ID NO: 250111 - RNA, 68 nt, Homo sapiens
gcagccaacacgggacggagaaagcaggacaagcagccgcgaaaccaagaacaagaaaggggcacaag

SEQ ID NO: 250112 - RNA, 77 nt, Homo sapiens
gcgacaacagggaaggagaagcaggcacagaaggcgccaggagaaacaaggcgaacggggcggagaacggaaaagca

SEQ ID NO: 250113 - RNA, 67 nt, Homo sapiens
ccagacaaccagggccacagagagggaaccgacggaagaggacgaggcggaagagcgcgggagggga

SEQ ID NO: 250114 - RNA, 83 nt, Homo sapiens
cggcagccgcaccacaggcgggccgcaaggagcggacccaccggccaccggcggagcgaggcaaccgccgcgggccgagcccg

SEQ ID NO: 250115 - RNA, 56 nt, Homo sapiens
agaccgggggaaggagagagaagaggcgaaagaagagggaaaagacgagcaggaga

SEQ ID NO: 250116 - RNA, 74 nt, Homo sapiens
ggaccaggcggggcgcaggcagcaaagggccgcgacagaaaggagagccagcaaaggaggggcgcagacaaaaa

SEQ ID NO: 250117 - RNA, 62 nt, Homo sapiens
ccagggcgacaggaacagggcaaacgcagggcccagcaagaccagggcagcgacgccggcgg

SEQ ID NO: 250118 - RNA, 78 nt, Homo sapiens
ccgagacacgcgggaggcggcgacgggcccggggaccgagcgcggacgagccaagcaggcacaaccgagcacagaagg

SEQ ID NO: 250119 - RNA, 82 nt, Homo sapiens
ggcaggcgcggcgccggcggcgggacgaagagggacgggcccgcggcgagcgagcccgagagacggagcgcagggccaggcc

SEQ ID NO: 250120 - RNA, 77 nt, Homo sapiens
cacagcccaccccacgaacagaagaagaagaaagaagagagcaaggaagcgggacaaccacaccgaaggccacccca

SEQ ID NO: 250121 - RNA, 79 nt, Homo sapiens
caccacagaagacaggacacaaagcacgcgacaggaaccaggccagaacagaaaagcccaggaagccagcccagccgcc

SEQ ID NO: 250122 - RNA, 81 nt, Homo sapiens
ggcgaccccgcagcggccgggcgcgcggcccccacccagcaaacgaaaccggcagcagccggaggggaaggggaaaacacg

SEQ ID NO: 250123 - RNA, 76 nt, Homo sapiens
gcgggagcaacgggaggccggacccagcgagcgggcggcacgcacgcagcggcccagcccagcgcccgacgccacc

SEQ ID NO: 250124 - RNA, 80 nt, Homo sapiens
acccgaagagccaggagagggagaccaagaacagacgccccaccaggccagcggggcgcagagagaacccgggcccaggc

SEQ ID NO: 250125 - RNA, 65 nt, Homo sapiens
caacaccacggggccccagagaagaaccaacccagcagagcacagcaagcgggagcaggcagacc

SEQ ID NO: 250126 - RNA, 83 nt, Homo sapiens
ccaacaagcgaggacgggggcagcaacaacgagccggaacaggagggacggcaccagaccaccgcccacgaagcccgacgagg

SEQ ID NO: 250127 - RNA, 79 nt, Homo sapiens
aggccggccgcgccccccaggacccgccggcgcgagaagacagaagacaaggagacgcagagaaacggcagaggccagg

SEQ ID NO: 250128 - RNA, 72 nt, Homo sapiens
cagacaccaagggcgcgcgacacgaacaccgaggaggccaagggggcccccaaagggaagccaaacacaaag

SEQ ID NO: 250129 - RNA, 80 nt, Homo sapiens
accaggcaccaccggccccggaaggaaccaacagccgcaacccggccacggcaggggcacgacgcccagacacgggaccg

SEQ ID NO: 250130 - RNA, 83 nt, Homo sapiens
caagcggcagaccagacgcacacaaagccaggcggcaggagaggaggccgagacggcgcgcacggcaaccccgggagaaagcg

SEQ ID NO: 250131 - RNA, 80 nt, Homo sapiens
gccccggcaaaggcagggccccgccgcggacgcccgccgcgcgcggccaagccagccggccccagccaacaggcagacca

SEQ ID NO: 250132 - RNA, 36 nt, Homo sapiens
cagagagcaaaccccggaagagagaagacagcagcg

SEQ ID NO: 250133 - RNA, 68 nt, Homo sapiens
ccgaaagaaacgaaaagcagacaccggaccgcgcaagaaacggcaaaagccacagacccagacaagca

SEQ ID NO: 250134 - RNA, 67 nt, Homo sapiens
gaaggaccaagaaccagcacccaggaggggagagaacaaaacaaaggaaggcggaaagaccaggaac

SEQ ID NO: 250135 - RNA, 66 nt, Homo sapiens
cagcaaaaaccacccagacaaacgaaaagggcaagaccaacggagccaccggagaaccaccgaaga

SEQ ID NO: 250136 - RNA, 89 nt, Homo sapiens
cgagagcgacagcgcggggagagccgggcaggacggcgggccgaggagcccggggagggacccggagcccagggcaggcccaccgaaga

SEQ ID NO: 250137 - RNA, 108 nt, Homo sapiens
caacccacagacgaaaagagaggacgaaaccaaccacggagaaacggcgcacacaagagagaccagcccccaccaaagaggacccgaaggagacaaacgcccccccag

SEQ ID NO: 250138 - RNA, 72 nt, Homo sapiens
ccagaagaggagacgacggacggcgggcaccggccgacgggagaaagaagagagaccagaaacgagaggaga

SEQ ID NO: 250139 - RNA, 79 nt, Homo sapiens
cgcgccgccgcccacaagcggcgccgcgccccggccgcacgggaggagagaccagcagcaaacccacgcggcgcaccgc

SEQ ID NO: 250140 - RNA, 75 nt, Homo sapiens
ggaccaagaaccaggagcgccaaaaaagagggggcgaagggaaaagccccgcaggaggccgaagcagcaaaaacg

SEQ ID NO: 250141 - RNA, 85 nt, Homo sapiens
ggcacaggggcggacaacccacaagcgggaaggaggaggaggcgagaagaggcggacgaccccaggcgccgacaggaacgggaga

SEQ ID NO: 250142 - RNA, 73 nt, Homo sapiens
agagacgagcgggggacggcacgggccgcagaagacagggcggcgggccggacgacaagccgaggaagggacg

SEQ ID NO: 250143 - RNA, 59 nt, Homo sapiens
gaaaaaaaagaaacccaggaagcggacagacgggcagcgggccgcaggagggaagcgca

SEQ ID NO: 250144 - RNA, 78 nt, Homo sapiens
caaggagacgaccgcgcggaggagcacgcaaagcgcagaaacccgcgagcagaacgccgccagaagcccccggcgaga

SEQ ID NO: 250145 - RNA, 71 nt, Homo sapiens
ggcgcaccaaggacggaaggaaacagaagacagccgaaccaagggcgacaaccagagacaagcaggcgcac

SEQ ID NO: 250146 - RNA, 73 nt, Homo sapiens
ggggaggaacagaccgggaaagggcagggcaccccagccgcccaacccagaggcaccaaaaagcacgaaaggc

SEQ ID NO: 250147 - RNA, 75 nt, Homo sapiens
gccgcggcgcgggcagccgggaggagacaacaacaagaaggagagagcacgaccaccgccgagagacccacagag

SEQ ID NO: 250148 - RNA, 84 nt, Homo sapiens
gagcgaagcgccggggaagagccgacgggacgcccaaccgcccggagagaagcgaagcggcggcgcagcggcccaaccgccgcg

SEQ ID NO: 250149 - RNA, 76 nt, Homo sapiens
cccaccaggaggcgaccccgggccccaaaggggcccaggcgggaacaggacacggggacgagaacccgacaggccc

SEQ ID NO: 250150 - RNA, 63 nt, Homo sapiens
agggcaggacacgaaaacaacaccaaacgggaaggccgaaagaaggaaaacaccagcagggac

SEQ ID NO: 250151 - RNA, 76 nt, Homo sapiens
caccagcgccagggacaagggcaacccaagccgaggcagcccagcagggggggggagaggccagaggaacaaggga

SEQ ID NO: 250152 - RNA, 39 nt, Homo sapiens
ccagggagagcagaaaagagggcagcggaacgcgccgac

SEQ ID NO: 250153 - RNA, 68 nt, Homo sapiens
gggaggaagacccaaaaggcccccacagagagcacacaaacaaagcgaaaccacggaagaaaagggca

SEQ ID NO: 250154 - RNA, 77 nt, Homo sapiens
caagcacagaccgaagggacaaccaagggaccaagaaaggcccagggaccaaagcccggacaaggcccgagcaccag

SEQ ID NO: 250155 - RNA, 82 nt, Homo sapiens
ggccagagcggcacgaccacaccgcgagaagacaaggaccacagggcgcaaggaccgggagacaacaaaaaagggagaacgc

SEQ ID NO: 250156 - RNA, 80 nt, Homo sapiens
gaacggaccgagcagcagcagagacaccaaggccgcacggcgcccgacgccggccaaacagcacaccgacagccaagcag

SEQ ID NO: 250157 - RNA, 60 nt, Homo sapiens
ggacaccgagggcccccaaaaggggcaccaccacgaggcgaggggccaaccaaggaggcg

SEQ ID NO: 250158 - RNA, 70 nt, Homo sapiens
cgggcaacgggccacagcagcaccagcaacagccaaccagaaaaccagaaacaccggcagggagcaaacc

SEQ ID NO: 250159 - RNA, 39 nt, Homo sapiens
ccccacacacggaaagcagcgcagaccgacaacgggcgc

SEQ ID NO: 250160 - RNA, 82 nt, Homo sapiens
accacacggagggccgcccgcggaggagccgccgcgcagcccacgccgggaaaacagccacaggaagaagcacagagaaggg

SEQ ID NO: 250161 - RNA, 68 nt, Homo sapiens
aaaggcccagacaacacgcacaaaaagaccggggaggagagaaaacaagcacggcggacaggacacgc

SEQ ID NO: 250162 - RNA, 77 nt, Homo sapiens
accaccgaggaccagaaaccgccccagcgaggaagaggacaggagcggagaggaaggcgacacgaacaacagccaac

SEQ ID NO: 250163 - RNA, 65 nt, Homo sapiens
gagggaagaaacacagcacagagacggccggcaacaagcgaggggggaggccaggcgcccagaac

SEQ ID NO: 250164 - RNA, 79 nt, Homo sapiens
aagaaacaaaaggcagaaccagcccggaggcaaagggaagccggaaggacaagaaaaccccaggacacagagcggggag

SEQ ID NO: 250165 - RNA, 72 nt, Homo sapiens
gagcgggcacaaacaagcaccggagagcggaccgccaagaacggaaaacaagacgacccagaaacgaaggaa

SEQ ID NO: 250166 - RNA, 76 nt, Homo sapiens
gagcccgcaagaagaacagagacagcagccaaacccccaggcccagaaagcgggcaccagcgcaaggaacccagcc

SEQ ID NO: 250167 - RNA, 66 nt, Homo sapiens
aaaacaagagggaaggaggaaagcaaacccaacaaacaccagaggaagagaggagggagcaccgga

SEQ ID NO: 250168 - RNA, 68 nt, Homo sapiens
gcacgcggaaacggaaccacccccgaacaacaaacccacaccagagacccccaaccccacaaaggggg

SEQ ID NO: 250169 - RNA, 82 nt, Homo sapiens
caaagaccaaagccacagccaagagcccacggacaccacccaacgaaacccaaaggacaccagagcagcacgcgcacgcgaa

SEQ ID NO: 250170 - RNA, 61 nt, Homo sapiens
agggagaggccagaaacaggaccgaacaggaagggcaggaacagaagcgcaccgagacccg

SEQ ID NO: 250171 - RNA, 86 nt, Homo sapiens
agcgaagaaagggcggcgaggagggcgccgcggacagccagccaccagcagaaggccccggagccacccgaagggccccccaagcc

SEQ ID NO: 250172 - RNA, 48 nt, Homo sapiens
cacccccggcagacaggaccacgaaggaacgggcgcaccacgccaccc

SEQ ID NO: 250173 - RNA, 69 nt, Homo sapiens
caacagggccggccggccggcccccaaacgcgcccgcccccaggcaagcccaagccacagaccaaaaag

SEQ ID NO: 250174 - RNA, 72 nt, Homo sapiens
cagaacaggagaacagccacccaggaagaaagacccaccagcacggggaggcgacagggaagccacaccggc

SEQ ID NO: 250175 - RNA, 65 nt, Homo sapiens
gaaggggaaggcgccgaagaggacgaaggcaagaagcaagcaaccaggcgccgcaccagaagagg

SEQ ID NO: 250176 - RNA, 65 nt, Homo sapiens
cccaagcaaggccggaagaagagcgcagaggagcacagggagcggccgacgcaccggcacaggcg

SEQ ID NO: 250177 - RNA, 83 nt, Homo sapiens
ccagggccccccccagccgcccccgggagggcacaggcccggcaggggcccgacacagccgggccgcccgcggcagagcagca

SEQ ID NO: 250178 - RNA, 58 nt, Homo sapiens
ggggccccggcccacagcaacggggaggcgggccaacaaggggcggcaagaaaacagg

SEQ ID NO: 250179 - RNA, 82 nt, Homo sapiens
caagcgaaggcgcgcaccggaagcaccagcgaggaagacaggagacaagaggccaaaaggaacgagccaggggaacccagaa

SEQ ID NO: 250180 - RNA, 69 nt, Homo sapiens
cgggcagcgcaggggcgggaaagacccaggagaagccgcccaaagaacgacacccagaaaagcccgcaa

SEQ ID NO: 250181 - RNA, 65 nt, Homo sapiens
cgccccaggccaagagggacccacccggcgagccgcagccacagcaaaccggcaacacgcaggcg

SEQ ID NO: 250182 - RNA, 80 nt, Homo sapiens
gcgcgccaccaccaggacacgcaggagagaagccagcagggccgggggccaccgccacaggggaaggccccgggccccca

SEQ ID NO: 250183 - RNA, 69 nt, Homo sapiens
gaagcccgggaagggaccggcccaggccccccgccccgcgcagcagggacaaagccaagcaaaaaccca

SEQ ID NO: 250184 - RNA, 64 nt, Homo sapiens
cggaaccacccaccgagggaccaggccacaaaagacaagacacgagaagggccaagaacaagaa

SEQ ID NO: 250185 - RNA, 78 nt, Homo sapiens
cacacccaaccgccacggaaggcaagcaagagaaaggacagagaaccgagaaaaagaccaagcgaccgggggacgcgg

SEQ ID NO: 250186 - RNA, 76 nt, Homo sapiens
ccaaaggggaacacacggacaacgccaaacaagggacaagcaaggggccaaggagccaaggaggaaacccacaaca

SEQ ID NO: 250187 - RNA, 77 nt, Homo sapiens
ccagcgagcagagcggacgcccccaggagaaacgaggagcgcggccaccccccggagaccaagaaaacggggaaaaa

SEQ ID NO: 250188 - RNA, 56 nt, Homo sapiens
gccagaggcccggacgacagcccccagagccaggacaaaaccaggcagaaccaaca

SEQ ID NO: 250189 - RNA, 77 nt, Homo sapiens
agcgaacgcgcaacagggccgcacgcaaggaagagggaggaacagcagcggaaacaagcacggacggcgggagggcg

SEQ ID NO: 250190 - RNA, 62 nt, Homo sapiens
gggacaggagggcaggaagagcgcagcggggacaaggcgcaaggaagaagagacgccgcgcg

SEQ ID NO: 250191 - RNA, 76 nt, Homo sapiens
cacagcgaaccaagccaccagcgaggaaaagccagaaccaagacagagagaacgggaccagacacacgcaaggaca

SEQ ID NO: 250192 - RNA, 85 nt, Homo sapiens
gaaggagaggagaagaggaacgcaggagagcagcgaaggagagggagcggggaggggccaagaaaggggaagaagaagggccccc

SEQ ID NO: 250193 - RNA, 73 nt, Homo sapiens
agacaacacaggaagaacgcagagaacacccaccacagacaggccgacagcaggaagcaccagacaccaacca

SEQ ID NO: 250194 - RNA, 75 nt, Homo sapiens
gcgccgacccaaggaaaaggggcacagaggcgcacagaacccaccaaaagggccccaccaccacgacccggacga

SEQ ID NO: 250195 - RNA, 84 nt, Homo sapiens
gcagcccaggagcccaaggcggcccggcgggcgacggacggccggacagccaggccaaggaaaagaacagcgacccccagcagc

SEQ ID NO: 250196 - RNA, 75 nt, Homo sapiens
cagagaagaaaacaccgccgccacacaacacaacccaagccacagcaggaggcggagacgcgcccaccaccgaac

SEQ ID NO: 250197 - RNA, 79 nt, Homo sapiens
ggcagcccgggagcggcgagggaaaagcgaggcaaggcaggcgggcagccacgccaaggaagaggacggagaggccggg

SEQ ID NO: 250198 - RNA, 69 nt, Homo sapiens
gggaacgcaggacccaaagcgcccgcggagcagaagcacgccccgagaaacggggcgaacacgggggac

SEQ ID NO: 250199 - RNA, 61 nt, Homo sapiens
gccaacagaaccaggcgcagaggcacgacccaaaaaggagccagaaaaacgggcaaacccc

SEQ ID NO: 250200 - RNA, 70 nt, Homo sapiens
agggacgggagaagaagagaagagagacaacaagagaacagggcagggcaggaccccgaggcgcgcccca

SEQ ID NO: 250201 - RNA, 69 nt, Homo sapiens
caaacagccaacccagagagcgaaggagaacgggaggcgggaacacaagagcgcccgagcggcgccgac

SEQ ID NO: 250202 - RNA, 77 nt, Homo sapiens
gaaacacccagaggggcggaaggaaaaaagaaggggggcagaaagaagaggaggacaacaagccaacagagagagac

SEQ ID NO: 250203 - RNA, 83 nt, Homo sapiens
cggggagacagcacgccaggagggagaggagaccaacacccacccagggcggccaaaacagaagaggcaaagcccagccacag

SEQ ID NO: 250204 - RNA, 68 nt, Homo sapiens
accgggagccgcaccaacgggcccagacccgggaccagccggacgccgcgggacgggaagggaggacg

SEQ ID NO: 250205 - RNA, 77 nt, Homo sapiens
ggaggagagaccggaggccgagggaacgaagcccaaaaggcagagacggaccgagacaggagagcaggggcccagcc

SEQ ID NO: 250206 - RNA, 72 nt, Homo sapiens
gcgcacacaccacgggcgaggcaacgacaagcagaccggaagaccgacggaagaccacaccccgagggagcc

SEQ ID NO: 250207 - RNA, 82 nt, Homo sapiens
cggggccggagcggagccggcgccgggcccgggccaggcggggggagcggacccgacaagccaggcccgggcgcacgaccgc

SEQ ID NO: 250208 - RNA, 81 nt, Homo sapiens
gcgaggacaggaaggagcacacaaacgggaccccaccacacagcagaaacgaacgaagacaaagcaaaaccacaggagaaa

SEQ ID NO: 250209 - RNA, 76 nt, Homo sapiens
cggacaaaaaaaccgcgaccggccgcccgcacaagccagaggccaacccagggcagaggaacgaggacgccgaagg

SEQ ID NO: 250210 - RNA, 72 nt, Homo sapiens
cgcccggaccgcgcagaaccagggcggcggccagcgccacgcacaggggcaaggccgaggggaacagcacac

SEQ ID NO: 250211 - RNA, 65 nt, Homo sapiens
agacggcaaaaagccaacagagccgcaggccaagggaagaaccaacagagaccccgggggacgca

SEQ ID NO: 250212 - RNA, 74 nt, Homo sapiens
ccaggcgacgccacccaagacacaaacggcgacacagcccagggcgggacaaagagacagcagaaggaggagcc

SEQ ID NO: 250213 - RNA, 70 nt, Homo sapiens
ggccgcagacaacgcagcaggggccacaaagacaggcaaaaggggaaagccggagaagacaaccgaagcg

SEQ ID NO: 250214 - RNA, 70 nt, Homo sapiens
cccccccggcgccccccggcccccgcgcgcacgccccgacgcaagacgcccggcccggggaccccgggag

SEQ ID NO: 250215 - RNA, 39 nt, Homo sapiens
gccggggagaggcaccggggggccccagcccggccgaac

SEQ ID NO: 250216 - RNA, 74 nt, Homo sapiens
cacacgcaaagcagagaaagggagaccagcacgagccgggcgggacgccggaaggggcacaagacacgcacaag

SEQ ID NO: 250217 - RNA, 86 nt, Homo sapiens
gggagcagggcggccccagcagacgcaggcagccccaaagccgaacaggcagggccagacccagaggcacagggccaggcacacaa

SEQ ID NO: 250218 - RNA, 83 nt, Homo sapiens
ggcgggcgcaaacgcacacgacggccccgcccccggccagccaacggacagcggagcacgagagaaggcaacagaaggaaaac

SEQ ID NO: 250219 - RNA, 69 nt, Homo sapiens
gaggacagagaagagagaagccaccagcaaaagagagcgcaaccaacccacgaccgcaacgcaagcaga

SEQ ID NO: 250220 - RNA, 82 nt, Homo sapiens
aaacacccaggacacggccacaacaccaagaggggccgacgcgaggaggacagcagcgcagcagcccgccgcaacccgggcc

SEQ ID NO: 250221 - RNA, 112 nt, Homo sapiens
ggcaggagcagagacaacacaggaagaacgcagagaacacccaccacagacaggcagcggggcaggaacaacgggccaaaggccacacacagagggcgccgagcgggacgcc

SEQ ID NO: 250222 - RNA, 67 nt, Homo sapiens
cacgagaaggaacccaccaccaaaccggcggagcacacagagaaaacgggaaacggaaaaagagcgc

SEQ ID NO: 250223 - RNA, 59 nt, Homo sapiens
cagcgccaagcccgagaccgcggcccgaaggagggccccggagcagccacaccaccgag

SEQ ID NO: 250224 - RNA, 60 nt, Homo sapiens
ggggaagccgaaggcagaaggagacccgcggaaaagaggagccgccgcgcccaggcggag

SEQ ID NO: 250225 - RNA, 78 nt, Homo sapiens
ccgggaggccggccgggccagcacccggccgagacggcggcagcagcggcacaggagacagacgggaggggacacgga

SEQ ID NO: 250226 - RNA, 34 nt, Homo sapiens
agcccaagagaacaaacgaaaggagccgcgcacc

SEQ ID NO: 250227 - RNA, 41 nt, Homo sapiens
ccaacgccaggcgccgcccacaggaacaagcacacagagac

SEQ ID NO: 250228 - RNA, 66 nt, Homo sapiens
aaggaccaagaaccaggcgggcaaccagaaccaaagaaaagaaagaccaacaaagaagggaaacaa

SEQ ID NO: 250229 - RNA, 74 nt, Homo sapiens
acgacgcaccgcaggcagacaaaagggccaaagaagggagagagggccggagcgagggagagcaggaacacaga

SEQ ID NO: 250230 - RNA, 81 nt, Homo sapiens
ccgccgccgccgggcggaggagcacagcaagcgggagcaggcagaccaaaggaacagaagccagggccggaaaaccagaga

SEQ ID NO: 250231 - RNA, 75 nt, Homo sapiens
acagaagccacaggcagagccgcaggaaagcaggaccagcaagcccaaccgggagggggaacccaggagcccaaa

SEQ ID NO: 250232 - RNA, 82 nt, Homo sapiens
gccgccgcagacccagcagccaagagggaagcagacgagagcaaggaagagagaaggccacgcccgaccccaagcaacaacg

SEQ ID NO: 250233 - RNA, 79 nt, Homo sapiens
gagccgaggaggggcgcgaggagggacggaagcgagaaacagggaaaacagaagcggagaggcccagaacagcagaagc

SEQ ID NO: 250234 - RNA, 76 nt, Homo sapiens
gcgccacaaggaggacagaggcacagcgccagagcaaagaggaggcgacagcaccaggacccgggaacccagaaca

SEQ ID NO: 250235 - RNA, 53 nt, Homo sapiens
ggacggcgccggcagccggccgaaaagaacaggaacagacgacagggaacagc

SEQ ID NO: 250236 - RNA, 72 nt, Homo sapiens
ccaagcaaaacggcgccaggcgagccccacagacaccaaaaaggcaaggacagaacccaagcaggccggaga

SEQ ID NO: 250237 - RNA, 66 nt, Homo sapiens
cccgaaagaagaaaaacccaagaaagagcgcagcgggagaagcggaacgggcacaaagaaggcgca

SEQ ID NO: 250238 - RNA, 83 nt, Homo sapiens
cgagaccggaccgagagcggaccgagagcgcgaaacgcacgagaaggccacacacccccacggcgagacccagagagccaaga

SEQ ID NO: 250239 - RNA, 75 nt, Homo sapiens
caccccgccggcaaggaggcaccgcggcagacgggaccacgaggcaacgccccagcgcgggccaggcacgacacc

SEQ ID NO: 250240 - RNA, 80 nt, Homo sapiens
gagacacggccgaaggggcgcgcggccccgccgccccagcccgccccccgggccggacggccccgcgccacagggccaca

SEQ ID NO: 250241 - RNA, 72 nt, Homo sapiens
ccagcaccgggacgcacagagaccggaagaccaagcaggagaaccgaccgagcccgaaaacgggaccaggaa

SEQ ID NO: 250242 - RNA, 77 nt, Homo sapiens
caaccgccgagcaaggggacccggaggaggcggggagacaaccccccccaagaagcgagggacaagcacgacccacc

SEQ ID NO: 250243 - RNA, 67 nt, Homo sapiens
ggaacagcacgcaaaagaaccaacgacaaacgcagaacaaagccaaaggcccgacaaggagacccgg

SEQ ID NO: 250244 - RNA, 72 nt, Homo sapiens
caagcccagacaagccggggaggaagggcggcggaccgaaaaggaaggaaggacgaggcagacccgggagaa

SEQ ID NO: 250245 - RNA, 61 nt, Homo sapiens
accaagaaccaggggagccaggacaggagaggaaaaccaagcggaaacagcccaaggccac

SEQ ID NO: 250246 - RNA, 78 nt, Homo sapiens
cggggaccggcgcagcggcggagaacaccgcacagaccggcaaaccagaacgagaaggaaaggaaagacaggcacgcc

SEQ ID NO: 250247 - RNA, 55 nt, Homo sapiens
ccagagaaaaagcgggacaaaccagaaacccaacgaagcaaaaaaggaagcccag

SEQ ID NO: 250248 - RNA, 75 nt, Homo sapiens
gggacgagcggagcccgggacaggagaacgaggaaccccagagaggacagaagccaaccaggcagcagaggaccc

SEQ ID NO: 250249 - RNA, 70 nt, Homo sapiens
cccagcgcacagggaagggggcaggggagcggcaggggaggcgaagaagagcccggacagaaagacgaca

SEQ ID NO: 250250 - RNA, 76 nt, Homo sapiens
ggaccaggcacccagcgggccccccaggaaaaaagcaggaggagccccaaaagaggaaggggaccacagggacaaa

SEQ ID NO: 250251 - RNA, 71 nt, Homo sapiens
acgaacgccaggccggcgccaaacccagaggggacccagaccaaacggccaaacggaccagacacaccagc

SEQ ID NO: 250252 - RNA, 78 nt, Homo sapiens
ccgagcaacccccagagcaggagggacaggggcccagaggccagaaggagcagagccgagacgacgcagaccgcacag

SEQ ID NO: 250253 - RNA, 52 nt, Homo sapiens
gcacgaaaaaacccagcgaagaccacagaaaccaaaaagccgcgagaagggg

SEQ ID NO: 250254 - RNA, 70 nt, Homo sapiens
gcccccgcccgacgcccggcgcacggggcgcacaccacggcccggcaacaaaggccaggggcagcacccc

SEQ ID NO: 250255 - RNA, 70 nt, Homo sapiens
gaaaccggaggcaggaaacgcagcaaagccacgggggagaagggcgacaggacaacggacagcaaaaaag

SEQ ID NO: 250256 - RNA, 81 nt, Homo sapiens
aggcaaagggaaggggggaccgcggcgcaggacgccgacacgggccgcgccagacaagcagaccggaagaccgacggaaga

SEQ ID NO: 250257 - RNA, 82 nt, Homo sapiens
ggcggcaggccgcagcgcccgagcgagcaccccccaacgggcaaaccccgcccagcagggacgaacagcggggacgccccag

SEQ ID NO: 250258 - RNA, 71 nt, Homo sapiens
aaagccggccaagagccggccccgcgaccccccgcgggaggaaggaacagccaaagaccacagcgagcccc

SEQ ID NO: 250259 - RNA, 43 nt, Homo sapiens
ccaagaagccagcaagcggccagaccccaagaagaagcggaag

SEQ ID NO: 250260 - RNA, 66 nt, Homo sapiens
gggagggaaggagggaagagaccgagcccgggggaccaaagaccccagggccgagaggcccaggag

SEQ ID NO: 250261 - RNA, 68 nt, Homo sapiens
ggcgccgacccgcccgggggagagaccaggagggaagccggaaacccccccccccccccccccacaga

SEQ ID NO: 250262 - RNA, 71 nt, Homo sapiens
ccgcacagcaccagagcggcgcaccacgaggcccccccagcgcccggaaacggacaaagaaaagggagaaa

SEQ ID NO: 250263 - RNA, 72 nt, Homo sapiens
gcggccaacagggagcaaggggaagacacagcggcagcagcggcagccgcgccaggaagcacgagcaggcca

SEQ ID NO: 250264 - RNA, 76 nt, Homo sapiens
ggaccagagcgacgagaagagagagaagggagagagaccaaagacgagagagggcgaagacaggacggcccaggca

SEQ ID NO: 250265 - RNA, 71 nt, Homo sapiens
agaacgcacgaacaaggccaggacggcgaggaacacacggagagaggacagggcccaaaaaggcaacaaac

SEQ ID NO: 250266 - RNA, 74 nt, Homo sapiens
gagagcagaccaggaaaaaagaccgagagaaagagacccaagagagacaagaggaaaaagaggaagccaagacc

SEQ ID NO: 250267 - RNA, 88 nt, Homo sapiens
ggagcgcagccccagaacacaacaccagaggggagacgagagggacaggagcgagcaagcccagagcggccgccagcaccccggcagg

SEQ ID NO: 250268 - RNA, 64 nt, Homo sapiens
gggaaaccggaccacacgcgccgaagcggaggggaaacagggacgacagaaaaaaaaaagccgg

SEQ ID NO: 250269 - RNA, 55 nt, Homo sapiens
gaaagaaaagagagccaaagagccgaacagccagcaggggaaaggaggcaaggcg

SEQ ID NO: 250270 - RNA, 53 nt, Homo sapiens
gcccagaacagaagggcagaacaagaaagcaacaaccacagagaacaagacaa

SEQ ID NO: 250271 - RNA, 71 nt, Homo sapiens
acggggaccccggagcccagaagacagagggcgagaaagccggacccacagccgccagagagaccgggcca

SEQ ID NO: 250272 - RNA, 100 nt, Homo sapiens
gcaaaggcaagggagaaagacaggggagaaaaaggaggaggacaaagagaggaacccccgcaggagcggcagcccacaagcaggaagaccagccccagga

SEQ ID NO: 250273 - RNA, 74 nt, Homo sapiens
gcccagccaaagaaacaagccgggaaagggacaagaagggcaaagccgaagagccgaaacacacaagaccaggc

SEQ ID NO: 250274 - RNA, 77 nt, Homo sapiens
ggccgccagcagaggcggagcccgcagaccgcagaaggccggagacaccagcagggcggggcacaaagcgaaggcac

SEQ ID NO: 250275 - RNA, 86 nt, Homo sapiens
gggacgcgcccccggggccggcggccgaccgagaacgcagcaccacggccaacgagcgcccccaagcggagccggagggcacggcc

SEQ ID NO: 250276 - RNA, 59 nt, Homo sapiens
acccaggaagcagaagaagcgaggagaagaagagggccagcccgccagaggcccaccca

SEQ ID NO: 250277 - RNA, 75 nt, Homo sapiens
ccgcgggagagaggacccccccccccccccaaggggcaggcagggcccagcaggacgcggaaacaccccggaggc

SEQ ID NO: 250278 - RNA, 79 nt, Homo sapiens
ccggaccagcccggccggggccgcgggcgcccagagccgcgccgccgcgccgcccgcggcccaaagcccagccaaggac

SEQ ID NO: 250279 - RNA, 88 nt, Homo sapiens
aaacaacccagcagaggagaagacagcagccccaggacagcgggaagggggaaggacgaggggggagagaaacacccaggagccacca

SEQ ID NO: 250280 - RNA, 75 nt, Homo sapiens
acccacccaggaacccgccaccagaagaccgccgcgccgaccggagacaacagacgcaccagccggagacaccac

SEQ ID NO: 250281 - RNA, 86 nt, Homo sapiens
agcccgagcgagcgagcggcgcccagcccagcgcccggccgaaccccccgcagcagacagcccaccgaggaagaccaaaggaccaa

SEQ ID NO: 250282 - RNA, 67 nt, Homo sapiens
acccagaaaaagaaggagaagacaggaggacaaccggaaacacacaggaacagaccaggcaccccaa

SEQ ID NO: 250283 - RNA, 79 nt, Homo sapiens
agcgagcgcgcccggcaggccgccgcgagcagccaggcggcgggccagagagccaccggcagaagagccaacgagcgga

SEQ ID NO: 250284 - RNA, 68 nt, Homo sapiens
acaagacgaagccaccgcagaaggggagacacaagggcacgaaggaggacacccccacacgagcccca

SEQ ID NO: 250285 - RNA, 77 nt, Homo sapiens
ccaacccgcacccgcccgggggcacaggccccgcccagaaaaaggaaacccagacgacaaggaaggccaagggaccc

SEQ ID NO: 250286 - RNA, 82 nt, Homo sapiens
accagagaggaagacaacgaggaggccagaggaccaacgcccagagcgccgggggggcgacccaggccccggcaacccaggg

SEQ ID NO: 250287 - RNA, 81 nt, Homo sapiens
agcagaggacaggccgggagccgggaacggaggaagagcagggagggaacaaagggacggggcggcggcgagaagaggaaa

SEQ ID NO: 250288 - RNA, 72 nt, Homo sapiens
agggcaaggcgccagaccaaggagaccgagaagcaaagcgccgggcaccagcaagcagggcaggccgccggg

SEQ ID NO: 250289 - RNA, 112 nt, Homo sapiens
caagacgggggacccagacgacgcacagggcaaagaaaaagaagaagcacacacacaggagcccaaaagaaacagggcgcaggaaaagacgagccaggaaaagcaacaaagg

SEQ ID NO: 250290 - RNA, 80 nt, Homo sapiens
ggaggccgggagccgagagagcaacagacagccggcggacacggaccgcggaccggagaggcggggacggacagccagga

SEQ ID NO: 250291 - RNA, 73 nt, Homo sapiens
gggagccgagggccagagacaagagggaaggagagaaggagagagacccagcccaccaaaggaagcagcaaaa

SEQ ID NO: 250292 - RNA, 77 nt, Homo sapiens
gaacagcaggaacagcagaggacgacagcaggagagcagccaaaacgaggacggggaaccgaaaggggcaggaagcg

SEQ ID NO: 250293 - RNA, 58 nt, Homo sapiens
agacgggcggagccaggccagcggaagacgcagcaaaggccacaaagcgcaaccaacg

SEQ ID NO: 250294 - RNA, 86 nt, Homo sapiens
gcgccagaggacaggggcgaacgccgccgggagacccagccggcgggcgagcagggagagaacccggacccagaggaaagcagaaa

SEQ ID NO: 250295 - RNA, 73 nt, Homo sapiens
aagccggaagagagccaagccaggcccagcagccgccaccggcccgaagacccaaggaacacacggaccgaag

SEQ ID NO: 250296 - RNA, 60 nt, Homo sapiens
cgaggcaccgcgggacaggccgaccaggcccacacgcgggcaagaagcgcaaccgaggag

SEQ ID NO: 250297 - RNA, 85 nt, Homo sapiens
gacaaccagcgacgccggagcagcccaacccagggcggaaaacaccccaaaagccaaaagggaaaggaaaagaccaacaacagcg

SEQ ID NO: 250298 - RNA, 86 nt, Homo sapiens
acggagccagcggcgaggaggggccccagcagcccccgaaggcccacaggacaggagagaaagacggagggagccacccaaaacaa

SEQ ID NO: 250299 - RNA, 72 nt, Homo sapiens
gcgcccgggcccgccccggaggcacacaggagaaagcagacgcaaggggcgaaggagggaaaacggaggaaa

SEQ ID NO: 250300 - RNA, 72 nt, Homo sapiens
gcgggacagagccaggcacaccaggccacccggggcagccggccacccaggggagcagggcagcacccccca

SEQ ID NO: 250301 - RNA, 64 nt, Homo sapiens
gaagaaggcgggaggacgcagcagggcaacaggcggagaaaaaccacagagagacggggcacgg

SEQ ID NO: 250302 - RNA, 72 nt, Homo sapiens
ccacagagggacccggacaaccagaggcagccagcagggggaggccggacccgacgacacggccgcccaggc

SEQ ID NO: 250303 - RNA, 81 nt, Homo sapiens
gcaaggccgcgagaacagcaagcagggaagaggagcgcaagcgccggggaggaccgcagggcgacgcaccaaagcgaaaca

SEQ ID NO: 250304 - RNA, 88 nt, Homo sapiens
ggaccgagaccggaccgagagcggaccgagagcgcgaaacgcacgagaagcagagcaccggccagaacaagccaaggagccaagacga

SEQ ID NO: 250305 - RNA, 63 nt, Homo sapiens
ggaggcaccagccgccccacccccccacagcccagagccagcagagaggggccacgggccagg

SEQ ID NO: 250306 - RNA, 79 nt, Homo sapiens
agccccaagagcgggacacagccgccccccgagaaagagagaaaagccaggaacggcgcaggccaaacagcccggggaa

SEQ ID NO: 250307 - RNA, 77 nt, Homo sapiens
cccgagagcgagaacagggacggggcgaaagacaaagaagcaacacagaaacggaaaaggaaccacccaagagaaag

SEQ ID NO: 250308 - RNA, 73 nt, Homo sapiens
agagagaaaaaccggacgagcgagcaagggagcaagaggcagacagaccgagacgggcaaccaacaagaaaca

SEQ ID NO: 250309 - RNA, 80 nt, Homo sapiens
cgagaaaagaacagaccagaacaacagaggaaccaggacagaaacccacagaaagagggggcccgggcagggccacgccg

SEQ ID NO: 250310 - RNA, 76 nt, Homo sapiens
gaagagacgacagcaaggcggagcaaagaccaggggacgaaggccgcagacgaaggggaaagggaagcaagagcca

SEQ ID NO: 250311 - RNA, 72 nt, Homo sapiens
aggaaaggcgagggaagcgccggagggaagggcgccggaaaaccgcacagccggccaaggaccgagaaagca

SEQ ID NO: 250312 - RNA, 59 nt, Homo sapiens
agaaggcccaccgaggagaccagggacaaccgcgacccgcagaaggaggcggcgacggc

SEQ ID NO: 250313 - RNA, 70 nt, Homo sapiens
ggaaagagagaggggggaacaacagggaaacgaacagaagacgaacaggagaaggaacaaaggaaacgga

SEQ ID NO: 250314 - RNA, 79 nt, Homo sapiens
ccagagcccaggccaggccagggcacacccagcaccacggagaggaccacccggccaggagccccgcccgagagccgca

SEQ ID NO: 250315 - RNA, 84 nt, Homo sapiens
gcagacgaagagcaaaagccaacacgcaccgcaggcacagcgaagccaagggaacagaagcacccgcagaggacagaggaggag

SEQ ID NO: 250316 - RNA, 76 nt, Homo sapiens
caacagccaagagggcgcccagagacaacgagagaacagacagagggaagaaacagacgcggagagaagagagacc

SEQ ID NO: 250317 - RNA, 76 nt, Homo sapiens
ccccgaagcagcgcccgaagaagaaaccagggcagaagaagcaaaaaggaagcggagaccgagaagcaaagcgccg

SEQ ID NO: 250318 - RNA, 56 nt, Homo sapiens
cgggccggaacacccggcgaaccagagggaagggacgcaaaaaggaagccccacaa

SEQ ID NO: 250319 - RNA, 51 nt, Homo sapiens
cgcagcccgggggcgaggccagaacacgaaccgagagcacgggccacgaga

SEQ ID NO: 250320 - RNA, 65 nt, Homo sapiens
aaaccagaagaggagggcccagaagaaaaaggggaaccgcccaaaagcccgccagaagaaggacg

SEQ ID NO: 250321 - RNA, 55 nt, Homo sapiens
gaaccccaccggccagcaaccacgacaggagcggaagcgagagaggagaggaaag

SEQ ID NO: 250322 - RNA, 79 nt, Homo sapiens
ccgagaggaggacccaggcacgagccacccgccgcagaagaggaaagcagcagaaagcagagagcccagaagaaaccaa

SEQ ID NO: 250323 - RNA, 81 nt, Homo sapiens
cccagggggccacacgccccccccccacgccacacacacggaggccaacagacccaacccagaaggcaccaaacggagggg

SEQ ID NO: 250324 - RNA, 82 nt, Homo sapiens
gacccgcgcaggcgcaggaggcccgcccggcacgcccaaccaccagagcaccggacagaggcccaccccccaggaccggagg

SEQ ID NO: 250325 - RNA, 66 nt, Homo sapiens
ggaggaacagccgaaacacggcaaaggagcggagcggccaaaacaacaggcccaggacgagaaagg

SEQ ID NO: 250326 - RNA, 75 nt, Homo sapiens
ccggccccccagcgcccccggggcaaacccgagccaggggcaacgagggagaccaaagggaagggaggccaggac

SEQ ID NO: 250327 - RNA, 70 nt, Homo sapiens
cccagaacacgggagaaaaaggaaaacgcggaaaaccgacacaacagcaccccgcagcagcacaccagaa

SEQ ID NO: 250328 - RNA, 87 nt, Homo sapiens
ggccccagagagaccaagccacagcacagaggggaggccggaaaggcgcaccaagagagaagcgcgccaacaccaaccgccccagcc

SEQ ID NO: 250329 - RNA, 44 nt, Homo sapiens
gacagccacagcacacacagcggagacagcagccaacgcacgca

SEQ ID NO: 250330 - RNA, 66 nt, Homo sapiens
gacagaccggggcaagccccgggcgggacagccacagcccggagcaagccccagccccggcccggc

SEQ ID NO: 250331 - RNA, 79 nt, Homo sapiens
caaggagggggaccgggaacccacgaggcacccggacccgcaggccgcgcagagaccaccagaaaagagcaccggccag

SEQ ID NO: 250332 - RNA, 79 nt, Homo sapiens
ggagccgcccaccgggggagacccgcggcgcgggagaagcacaaagggacgagaaagccgacaagagacaacccccaaa

SEQ ID NO: 250333 - RNA, 76 nt, Homo sapiens
gaggccacgcagagccacgccggcagcaggccccgcacccgcggcgacccccgacgccggccccaccggccgcccc

SEQ ID NO: 250334 - RNA, 78 nt, Homo sapiens
aggaggcgcaccaggaagggcagaagacagcagccacacagcagggcccagccgcgggggcgcgggaggggaccggag

SEQ ID NO: 250335 - RNA, 94 nt, Homo sapiens
gagagcggccgacaagaggcggacggggagcgaacgggacagcccacacccggcgcggaggggacagagcgaagaaccccccaagaagacgaaa

SEQ ID NO: 250336 - RNA, 75 nt, Homo sapiens
cagggaccccccccgcgccgcacagccccgcgcccgagaccaaaccgaggcgcggagcacacagaaacgcaccag

SEQ ID NO: 250337 - RNA, 72 nt, Homo sapiens
gagcccacaaggaagaacaaagacgagccagacccccaggcgcgcgacgggaccacaggcgaccgggaccac

SEQ ID NO: 250338 - RNA, 76 nt, Homo sapiens
gaaccggacagaagcgcggcggcgcggcgaaaccacaagccgccgggaaccaaaggaagaaggcggcgcacggaga

SEQ ID NO: 250339 - RNA, 82 nt, Homo sapiens
ggcagcgcgagcgggaccagcgccggaggcgccgcagagaaacagcacccaggacacccaaagagcggaaccaaagaaaccc

SEQ ID NO: 250340 - RNA, 77 nt, Homo sapiens
cgcgggggaccgaggggacaggaccgcaggcgggcaacacaacaaggcgcggacacccagacaagcgcgccaccggc

SEQ ID NO: 250341 - RNA, 74 nt, Homo sapiens
ggcccgcggagcccagcacggcagaaacagccaaggacggaaaaaggacaaggaggaaagaaacgcaccacacg

SEQ ID NO: 250342 - RNA, 58 nt, Homo sapiens
aggccaagcggccagggccggggcacagaacaagacgggcggcagagaagagaagagc

SEQ ID NO: 250343 - RNA, 43 nt, Homo sapiens
agccccccccacgagacaacgggccggggccagggccaccggc

SEQ ID NO: 250344 - RNA, 75 nt, Homo sapiens
ccagcgggcccgcggaggcccgcgaggaacgacgccgaggaaggacaccgcagcccagacccaggaagaccaaaa

SEQ ID NO: 250345 - RNA, 96 nt, Homo sapiens
gagacggaaacagcagccagaccaccagaaccagcaaacaggaaagcaaaagcagaccggaaaacccaccggcaagaccacacccgaggggagccc

SEQ ID NO: 250346 - RNA, 57 nt, Homo sapiens
gccaaggaaaaacagcaagaacccaaaaggaagcaggagaagcaagaagaaggaccg

SEQ ID NO: 250347 - RNA, 67 nt, Homo sapiens
ggaacaggcacaccccacacaagcacgccaagaaccagaagacaaaaacaaggccgcgcagacggag

SEQ ID NO: 250348 - RNA, 78 nt, Homo sapiens
cccaccgcaaccggaggcaagcaccaaggagacagggaaacgaaaaccaccgggcaccacgagcccacgagagaggac

SEQ ID NO: 250349 - RNA, 75 nt, Homo sapiens
ccgacgcaggagggagagcacagcaagagccaggaccaccggaagccagaaaggggaccggagagcggaagagaa

SEQ ID NO: 250350 - RNA, 71 nt, Homo sapiens
ggaacaagagagaaagagggacagccgcacggaggcgaaacacaaaggggcggcaggacacaagcagggga

SEQ ID NO: 250351 - RNA, 51 nt, Homo sapiens
gggaaccacagaaggggccagagaagaggagacagaccaagccaaagcacc

SEQ ID NO: 250352 - RNA, 84 nt, Homo sapiens
caagcccgcgcccaacacccagaggagcaaaggcagaggccaagcccagacccagacggacagcggaaaggcccgcgcggcaga

SEQ ID NO: 250353 - RNA, 65 nt, Homo sapiens
gcggcggaggaagaaaaagagcaggaagcaacagcaagaggcagaaagaaagacaagggcgcaca

SEQ ID NO: 250354 - RNA, 82 nt, Homo sapiens
accccaggaagccagcgggggcagccagccgagggccaccgggaaggacagaagaccaggaggcagaaggcgaggacgagag

SEQ ID NO: 250355 - RNA, 74 nt, Homo sapiens
cccgcagcacccgaagccgcaacaacccgcgaacagaccgcaggaacagaaaaagaagaaaggcccgaaaaaaa

SEQ ID NO: 250356 - RNA, 70 nt, Homo sapiens
cggcagccgcgccggggccaagaccggacaacgcaacagaggccagaacaaaaagaggacaaaggagagc

SEQ ID NO: 250357 - RNA, 80 nt, Homo sapiens
ggagcgcaaacaggcggagacccggccgccaggagggagaggagggggcaggaggaacggcccgggcccggggagacggg

SEQ ID NO: 250358 - RNA, 70 nt, Homo sapiens
gaggaaagcgggaagaccacggagcggggagagccgccgcaaacccagaccggaagacgggaagccaagc

SEQ ID NO: 250359 - RNA, 75 nt, Homo sapiens
cggaaaaagaaccaagggcgagaaccgaaagcacacaccaggagccgaaacacacaagaccaggcagacagaacc

SEQ ID NO: 250360 - RNA, 83 nt, Homo sapiens
ggaagaaggcggaacaccggaggcgggaaagaccgaggaagccgacaggaccgggggcacggaggggaagcacccagaacccc

SEQ ID NO: 250361 - RNA, 54 nt, Homo sapiens
ccgggggagcgccgaaaagcaccggagccgccgcgcaggaccaggaggagaagc

SEQ ID NO: 250362 - RNA, 86 nt, Homo sapiens
cggagcgcgccgccaaggcggcgcgcgagcggagcaccgcgggcaacaggaaaacaacccagagaacccaaacccccagacaagac

SEQ ID NO: 250363 - RNA, 70 nt, Homo sapiens
gaggccccccagccacgggaacacagagagcacgggagaacgcaacaggccacccggagaaaagaaacaa

SEQ ID NO: 250364 - RNA, 77 nt, Homo sapiens
ggacccgcccagcagaagaagagaggagggagaacacagaaaccggccccagggcaggagaagagaagggggacagc

SEQ ID NO: 250365 - RNA, 67 nt, Homo sapiens
acagggcaaaaaagaaacgcaagcacaaaaggaggaaggacgcgcgcaggcggggccggggcgggcg

SEQ ID NO: 250366 - RNA, 86 nt, Homo sapiens
ccagagcgacacacggaacaggacaggaacgggacaggaagagaggccccccaaagcaccgcgcaggagccagagcgaggaaggca

SEQ ID NO: 250367 - RNA, 35 nt, Homo sapiens
ccggagaacgcgacagaccagccagagaaccagcc

SEQ ID NO: 250368 - RNA, 62 nt, Homo sapiens
ggagcgggggaggcacagaagggacaagggccgaacaccaacagaggaagaaaggagagccg

SEQ ID NO: 250369 - RNA, 86 nt, Homo sapiens
gggccccagcccagggccccggccgcccacggagagcgggggcggaggaaagcgcaaagggaaaagcaagaagggaaagaaaccga

SEQ ID NO: 250370 - RNA, 68 nt, Homo sapiens
agaaaagaagaggagaagcaagcagagggacggcaaaacagaacagaaaggcggagaaaaaagagggg

SEQ ID NO: 250371 - RNA, 82 nt, Homo sapiens
ccaagacaaggacagggggagggcaggccaggcccgcaggccgaggacacaagaaggaaagggaaggagagaccgggagcag

SEQ ID NO: 250372 - RNA, 76 nt, Homo sapiens
gaacaggcggcgcgcgcggcgcgggacgcgcgcgggcacccacggagccccggggcggcccagagcagacccacaa

SEQ ID NO: 250373 - RNA, 77 nt, Homo sapiens
gaccaacgcagggcggggagaaggcaccaacaggggaagaggagcggaaaaacaagcaaaagaaaaacagggaaaga

SEQ ID NO: 250374 - RNA, 77 nt, Homo sapiens
gagccaggggcagccgaacagccagcaggcgaaaaaaaggcaaagaagccgcccgggaagcgcccgagcggcgccga

SEQ ID NO: 250375 - RNA, 88 nt, Homo sapiens
accccgcggcgcccccggcccggagcaacgagcgcagcgccggaccaagaacgcccagcccgcgggcaccggcagaaaggaggaggaa

SEQ ID NO: 250376 - RNA, 59 nt, Homo sapiens
ccccgcggcacacaggggaaccaaggaacacacagaccacgcgccggcgccggagggcg

SEQ ID NO: 250377 - RNA, 34 nt, Homo sapiens
ccggaggggagcagacacagaggagccgccgcac

SEQ ID NO: 250378 - RNA, 80 nt, Homo sapiens
aagaagacagaacgcccccaccaccgcaaacaggcccaccgaaaagcgagaaaggccccagaccaccaacaccagccaag

SEQ ID NO: 250379 - RNA, 78 nt, Homo sapiens
ggagaggccaaaaggcgagacaacggacaggaaggaagaaccacagcagcagaggcaacccacaacagaggaaaaggg

SEQ ID NO: 250380 - RNA, 66 nt, Homo sapiens
agcgcgccggagccgccgaggccaccagaaccacccacgcagcagagaaaaacagaccaaaaacag

SEQ ID NO: 250381 - RNA, 92 nt, Homo sapiens
ggaagaaagagcagaggaaagaaaagaaacaccgaaccgccacccaggcccaagaaggagcaggaggagaagaaaccccaagaccagagggc

SEQ ID NO: 250382 - RNA, 73 nt, Homo sapiens
gcccagaaaacacgccaacgccgcccaagagagcaagaccgggcccacgagaaaagcccacgagaaaaccccc

SEQ ID NO: 250383 - RNA, 35 nt, Homo sapiens
gagggaaaaaagacaagagagaagggagaccgagc

SEQ ID NO: 250384 - RNA, 94 nt, Homo sapiens
ggagagaaggagaggcagcgacaccgacagggcacaccgcagcggagggccccaaggcggcagccccgaccgacggggcaacgcgaagaaacac

SEQ ID NO: 250385 - RNA, 55 nt, Homo sapiens
caggcggcgcggacggggcgggccgaggcagagcgagaccagccacccagcccgc

SEQ ID NO: 250386 - RNA, 76 nt, Homo sapiens
aaccgccgcgaaacccaagccgccgcgaggagcggcgcgggccccccccaccgcgcacccagccacaccccaccgc

SEQ ID NO: 250387 - RNA, 61 nt, Homo sapiens
ggagacaaggaaacacagccagcaggagccgacaccagcaccagacacacagggaggacca

SEQ ID NO: 250388 - RNA, 43 nt, Homo sapiens
gccggggacgacaaggaggacgaacgaagcgcgcggcaggcgc

SEQ ID NO: 250389 - RNA, 88 nt, Homo sapiens
cccagcaggaaagagaagccaggccaggcagaggaagcagaggccggagcagccagccagcagacgaaaaccagacgagagacagaag

SEQ ID NO: 250390 - RNA, 76 nt, Homo sapiens
ccgggccacccagcccgcccaaccccagcggagagcaagacaacggcaagcggagaagagcaaggccgaaccgaga

SEQ ID NO: 250391 - RNA, 47 nt, Homo sapiens
aaccacccacaaccagcagcaccgaccccgaacaccgccagaagcac

SEQ ID NO: 250392 - RNA, 79 nt, Homo sapiens
cgcgccgcccaagaccgcggcgcccccacgagagggcaaacgcgcgcagacccaaaccagcaaaggagacacagaaccc

SEQ ID NO: 250393 - RNA, 82 nt, Homo sapiens
ccaggccagccccacggcgcagccagggacagcggcaggacaagccccaggcccgcggggccaccagagccgcagggcccca

SEQ ID NO: 250394 - RNA, 72 nt, Homo sapiens
ccaggacagcaccagcgggccggaggagccagagcgcagaaagggcaacgcggggcgagccacagagacaac

SEQ ID NO: 250395 - RNA, 72 nt, Homo sapiens
ggaggcagaaaaaaacggcaacacagggacaccggaaacgcagagaaaacaagacggcgcggacggacagaa

SEQ ID NO: 250396 - RNA, 75 nt, Homo sapiens
agggagaggagcgggaaacgggagggaaccagcaacaagccgcggcaggaaaagcccccggcaacggaaagaaca

SEQ ID NO: 250397 - RNA, 72 nt, Homo sapiens
gcccccgggcccagaaccaggcccgaaaagcaccccccaaagccggagcggaaagaacagggcgcgacagga

SEQ ID NO: 250398 - RNA, 82 nt, Homo sapiens
aagccggcccggggccgcggacgaggaccagcagaggccagcacgagaacccaggcaccccgcaacccgcagagaggacccg

SEQ ID NO: 250399 - RNA, 57 nt, Homo sapiens
caaagaccacgaccgaccgcaaaaaccaaggacccaggagaaggaccagacgacagg

SEQ ID NO: 250400 - RNA, 62 nt, Homo sapiens
ggggggccacgcgacaagagaggaaaagaggcccaaagaaggagccacggaaggcccagagc

SEQ ID NO: 250401 - RNA, 73 nt, Homo sapiens
ccaaagcggcccagaggcaaagcggccaggcacacagaaggccaaaacccgcaaacacgagagaaaagaaaga

SEQ ID NO: 250402 - RNA, 86 nt, Homo sapiens
cgccgggagcaacgcgccggcccgggacccgaagccggcccaggacccccagggaagaccggagcggaacaacggccccggaccgg

SEQ ID NO: 250403 - RNA, 82 nt, Homo sapiens
aagcggcggagaagccaccacccaacgaccggggcgcggcagccacccgcccacaacacaagaagcccggggcagaaacagc

SEQ ID NO: 250404 - RNA, 67 nt, Homo sapiens
agaagacaccaaaaagcaaacggaccagaccgaccaccaaaacccaagggaagaacagacaagaagc

SEQ ID NO: 250405 - RNA, 81 nt, Homo sapiens
gcacaggcaagaaagcgaagagccagggaggcggacaacaggagccccccagcacagggacgagagacccgaaaggacaaa

SEQ ID NO: 250406 - RNA, 74 nt, Homo sapiens
gggaaggccggggcgcccggcgccggccgagaaggcagaggcggaggaaaaggccaaagcgacaagaaagagaa

SEQ ID NO: 250407 - RNA, 80 nt, Homo sapiens
gagagccacggagaagaagcgcggcccacacacccagccgggacgcaggagccaggagccaacccgccccgaaggacccc

SEQ ID NO: 250408 - RNA, 76 nt, Homo sapiens
gcccacgcgagcggcccgagacccgagcaaagaagggaaggacacaaccgaggcccagcaagagccaacacagcag

SEQ ID NO: 250409 - RNA, 73 nt, Homo sapiens
agaaagaaaaaggaagacaagagcaaggaagacgagaaagcaccccaacagaacaaggagcgcaagagaacga

SEQ ID NO: 250410 - RNA, 89 nt, Homo sapiens
cccagcagcaccaagcgggcggccccgacagaacgaaaagaagcccccgaggacaagcaggaggacagaagacaggagggcaagaccgg

SEQ ID NO: 250411 - RNA, 89 nt, Homo sapiens
gaacaaccggaaagaccaagagagaaagaaaaaacgcgaagagcaacagagagacgaacaggagaaggaacaaaggaaacggacagaaa

SEQ ID NO: 250412 - RNA, 66 nt, Homo sapiens
gcggcgcagcgcccgccgcggcccgggcccccccgccggaaacaggcgggacaagggcgcaccggg

SEQ ID NO: 250413 - RNA, 59 nt, Homo sapiens
agcggcaaagaccgcggcccgccacccaacagccgaaaggccgcccgcacagggggcac

SEQ ID NO: 250414 - RNA, 74 nt, Homo sapiens
ccccagcgcgcaaagcgcgaggggcgaggagaggcaaaaaccaagggaaagaggagaggggccccgagaaggcc

SEQ ID NO: 250415 - RNA, 75 nt, Homo sapiens
aggccaggaacccggggagaccccgacgggaggccgaggggccaggcaccgcaagggccagcaagagaggaccgg

SEQ ID NO: 250416 - RNA, 80 nt, Homo sapiens
ggaaaagggcaccgcccgggggggcggagcgcgcgggcagggggaaacaaacaaagaaaggacacaggaacaaagaggcc

SEQ ID NO: 250417 - RNA, 75 nt, Homo sapiens
gccgagacacgcagcggcggccagggaccaccggaggcgcagaccggggacagcaggcaagcgccggggaaccag

SEQ ID NO: 250418 - RNA, 76 nt, Homo sapiens
ccacaggcaaaggagcaccccagagcgccgggaggcggggcccccccagcaaacgcccacccagccagggacagga

SEQ ID NO: 250419 - RNA, 81 nt, Homo sapiens
aaaaaggagcaagaccaaggaagcaacaagaccaagcccagaggcaggcgaaccgcagaagcgcccagagaaggacgccca

SEQ ID NO: 250420 - RNA, 58 nt, Homo sapiens
gggggcaaagggacacgcaaagaaaggacaggacaggaaagcaaaacgcacgagacga

SEQ ID NO: 250421 - RNA, 71 nt, Homo sapiens
gagaggagggagaacaagcaacggcgggaaggaacggccaggagaacaaccagcaccgggacccaaacagc

SEQ ID NO: 250422 - RNA, 72 nt, Homo sapiens
cagaaaaacggcgaaggcaaaagggaaagcaaggggaagggcccaagaagacaccccaccagaaaccgaacg

SEQ ID NO: 250423 - RNA, 78 nt, Homo sapiens
cgagaagggaacccacagaaaggagacgcaacaccaggaaacaagggacgaacaaaacaccgaggaaggacacacaca

SEQ ID NO: 250424 - RNA, 68 nt, Homo sapiens
gggagggcaaagacaacacaaccgagcggcggaaggaaacacacagaagaccgcagaccaagggagca

SEQ ID NO: 250425 - RNA, 57 nt, Homo sapiens
cccagccccaacggcaagcaacggaaggaagaaagacggaacagaccagagccgccc

SEQ ID NO: 250426 - RNA, 80 nt, Homo sapiens
accaagcccagcaaacagagacagcaagcgggggaaggacaccacggaccagcgcgccaggccgaaccagcgggcgaagc

SEQ ID NO: 250427 - RNA, 35 nt, Homo sapiens
gccgacagacaaccagccccgggaacagagagacc

SEQ ID NO: 250428 - RNA, 108 nt, Homo sapiens
agcaggagacagcacacagcagccccaccgagaggccggccccggggcccccggcggaacccacaggagagaaccacccagagccgccaccagggggagaccgaagag

SEQ ID NO: 250429 - RNA, 70 nt, Homo sapiens
ccaacggcccaccacccagggccgcgcgcacggaggagagaaagaacccacgcaggacgacagaagaggc

SEQ ID NO: 250430 - RNA, 75 nt, Homo sapiens
acccggaggagacggggcagacaacggagcccgggaacgggaaagaaggacacccaaaccaaaagagaagcaacg

SEQ ID NO: 250431 - RNA, 75 nt, Homo sapiens
caccaccccccagccacagggacaaccagcgaagaccgaccacagcgcgcccggccagcgaacgcagcccccggc

SEQ ID NO: 250432 - RNA, 61 nt, Homo sapiens
gaagccaacccccaggaccaccggaaccaagcggcacgcaggcaacacgagccccagcaac

SEQ ID NO: 250433 - RNA, 65 nt, Homo sapiens
caaaaacacgcagggcgcagagccaaagcgggaaaacggcacaaggcgacgagggagggcagacc

SEQ ID NO: 250434 - RNA, 79 nt, Homo sapiens
acgaagaacgcaggagcaaagaccagacccacagagagagagacccaggccagacagaagagggagaccggagaccgac

SEQ ID NO: 250435 - RNA, 78 nt, Homo sapiens
gcagaccggaggaggcgggggcgccggcagaggaccaggcaccaccggccccggaagacaccacgccacccaagagag

SEQ ID NO: 250436 - RNA, 67 nt, Homo sapiens
cacacggaccagcagaacagaaacaagaccccgaaggggacaggaccgccaaaagggacagccccgg

SEQ ID NO: 250437 - RNA, 74 nt, Homo sapiens
cagcaaccaggacagcccccacgacaagcaaacaacggaaaggagggggaagcaacggccaaaagccgacacgg

SEQ ID NO: 250438 - RNA, 54 nt, Homo sapiens
caaggacccacgaagccaaagaaggagagaagaagggcaggaccacggcacgaa

SEQ ID NO: 250439 - RNA, 90 nt, Homo sapiens
gccagcgagccgccgacccgccgagcaaaagcagccggcccagcccaccccaggcccccccagcccagcaccaccagcagaaaacaacag

SEQ ID NO: 250440 - RNA, 40 nt, Homo sapiens
caggccccagagacaccaggcacaccgaaccacccggggc

SEQ ID NO: 250441 - RNA, 78 nt, Homo sapiens
ccgaacagccagcaggcgaaaaaaaggcaaagaagccgcccgggaagagcaaccgaggaggacaacacacaaagacca

SEQ ID NO: 250442 - RNA, 61 nt, Homo sapiens
gacaagaagggcaaagccgaaggcagccgccgagaccaggcgccccgcaagcaccacagcc

SEQ ID NO: 250443 - RNA, 75 nt, Homo sapiens
gcaccgggacggaccgagaccggaccgagagcggaccgagagcgcgaaacgcacgagaagagagaaaggcaagag

SEQ ID NO: 250444 - RNA, 72 nt, Homo sapiens
caacggggcacaacgcggccggcgcccgcacccaccgagaaccagccaccgacccacaaagcggccagaaga

SEQ ID NO: 250445 - RNA, 63 nt, Homo sapiens
ggaaggggcccgaagcccccgcaggaaccacaacccaaccagacagcaaagcaagccaagagg

SEQ ID NO: 250446 - RNA, 81 nt, Homo sapiens
cccccccaccaccaggaccaagggcagccaccggaaggccgcgggggaaggaggacgcagagagggcacacggggcgaagg

SEQ ID NO: 250447 - RNA, 70 nt, Homo sapiens
ggagagcgaagacgcaagcaccggggccgcgcccaggcccaggacccagcccaggacccccgcagccagc

SEQ ID NO: 250448 - RNA, 71 nt, Homo sapiens
acccaggccaagaagaaggcggagaccaggaagaagagagcgggggcaaacgcagaggcgggaacaaacag

SEQ ID NO: 250449 - RNA, 69 nt, Homo sapiens
ggaggacaggggcagggggaaggagaccgaaaagaccgaagaaacggacgaaagccacaaacgaacagc

SEQ ID NO: 250450 - RNA, 77 nt, Homo sapiens
gaaggaccaagaaccagccaggacccgaaaagccagcaagcgagaccaacaccaacacgagggcggcggaaaaagcc

SEQ ID NO: 250451 - RNA, 63 nt, Homo sapiens
aggcaacacgcaaggccgccaccaggccagcgcgggccgccagcggcggccaccacagcgccg

SEQ ID NO: 250452 - RNA, 79 nt, Homo sapiens
cgccgcggcgcagcacgggagggaagggcagacggcagaagcggcggggcccaacaagcaaggacacacaggaagggcc

SEQ ID NO: 250453 - RNA, 60 nt, Homo sapiens
gaggcagaggggaggcgcgaaagacaagggaggcgaggacggacaaaaggaaacggacgg

SEQ ID NO: 250454 - RNA, 80 nt, Homo sapiens
ccacgcagcaacccccagaccagcaccccgcccagccacccaagaagcgggaccacaggaggaggcagaacagaaaaaca

SEQ ID NO: 250455 - RNA, 79 nt, Homo sapiens
aacagagaagcaacccaacagacaggcaaaagaaacagggaagacaaaggcacaggcaccccaggaagaccccaagccc

SEQ ID NO: 250456 - RNA, 54 nt, Homo sapiens
ccgccacacacccgccccggcccacacccgccaggcccagccccgccccacacc

SEQ ID NO: 250457 - RNA, 88 nt, Homo sapiens
aagcggacccaacacaaaggcccagcacgcacgccaagacgagggggaccccacaccacaaaccgaggaaagaagggacagcagaaaa

SEQ ID NO: 250458 - RNA, 47 nt, Homo sapiens
aaaagaggacacccaacgagaagcggggaaaaagaccggacacccca

SEQ ID NO: 250459 - RNA, 71 nt, Homo sapiens
aaagccacgcaggcagagagcagcgagaaaccagaaaacacggaacaaaggagaaagacagcaaagaaaag

SEQ ID NO: 250460 - RNA, 82 nt, Homo sapiens
cacaggacgagagggagagcaagaccacagcgcgcggcccccacaccacacagagagcgagagccagcaccgccgaccgcca

SEQ ID NO: 250461 - RNA, 71 nt, Homo sapiens
acaccaagcccacagagggaaagaagaggccccagcacacggcggagcaggagcaaaggagcaagaaacca

SEQ ID NO: 250462 - RNA, 96 nt, Homo sapiens
ccacccgcccccaagaaggaagcacagggccggccggaacagggagcacgagacagcgccggccccaacgagggagacaccaagcggagacgcaag

SEQ ID NO: 250463 - RNA, 58 nt, Homo sapiens
ggagaaagccacaacagggcggcaacaggggcgagaaagggagaccgagaagcaaagc

SEQ ID NO: 250464 - RNA, 78 nt, Homo sapiens
gaccagaaacggaggagcccgccgaagcagagcccaaggacccagaacccaaaaagaccccggcacagcaacaaagag

SEQ ID NO: 250465 - RNA, 80 nt, Homo sapiens
gacgaccgcccagagccaaaggcccgccggaagaaaggaaacaggaacacgaaagaggaaaaacgcacaagaaaccgaag

SEQ ID NO: 250466 - RNA, 104 nt, Homo sapiens
acccgccagacaagccgacgcccccagccggcccgaagccggaaacgaccgaaagcaaaaagcagaaacccaggaccgccggaggcagaagagcagccacccaa

SEQ ID NO: 250467 - RNA, 63 nt, Homo sapiens
gaggacaccgagcccagaagacaagacagggagcaacaaacaccgaacgaccggagcgagcac

SEQ ID NO: 250468 - RNA, 88 nt, Homo sapiens
gaggcaggcccgacccgccccccggcgccgccgggccgacggagaccagcaggcgccgcccaagagagagaagagaggcgcgagggca

SEQ ID NO: 250469 - RNA, 77 nt, Homo sapiens
gaacaccgaaaacagggaaagaaacaggcaacggaacagcgggccgcccacgaacgggacccgaaaagggggagcac

SEQ ID NO: 250470 - RNA, 82 nt, Homo sapiens
gggagcacggacggacagagaaccgaggaaaccacgacgggggagcccccacacgagggaaaagacgagggaagaagaccga

SEQ ID NO: 250471 - RNA, 70 nt, Homo sapiens
agccccgccagccagcagagccgcccccgggcagaagagagaagaagcaaaccgggaccggaagcaccaa

SEQ ID NO: 250472 - RNA, 51 nt, Homo sapiens
cgggagaagccggaaggccagagggggcaaacccaaccaccccacaggaag

SEQ ID NO: 250473 - RNA, 78 nt, Homo sapiens
cgacacaagaacagaacaggcccaggggcaaccaggcagacccgaccccagcgcccacagccacgaagcagaggccca

SEQ ID NO: 250474 - RNA, 77 nt, Homo sapiens
cagaagcacagaaaacaggccggggggggcacagagccccggaagacagcccccagcgaccagacccagggccagag

SEQ ID NO: 250475 - RNA, 82 nt, Homo sapiens
cggagcgcagcggcacgcacgcgaagacagcggcagaggacgaagaggcaaaagcagaacaagcgcacaagagagggacacc

SEQ ID NO: 250476 - RNA, 61 nt, Homo sapiens
gaggaaagccgaaggacagagccacccgacacccggcagaccaagcaccgaacccagacca

SEQ ID NO: 250477 - RNA, 84 nt, Homo sapiens
accccaccaagcaagcgccgaaaagccacgcaccagcgggggcgggaacacgggccggaggaaggcagccaagaggaaggggcg

SEQ ID NO: 250478 - RNA, 53 nt, Homo sapiens
acgaagacgcaagaccgggggagagacaaccagagcggaaagggagaaaagcc

SEQ ID NO: 250479 - RNA, 74 nt, Homo sapiens
ccggaagagcgccccaggagaaacaagggagaagcagaccgcaccaggcgggaccccgaaaaagcccaaacaga

SEQ ID NO: 250480 - RNA, 77 nt, Homo sapiens
acaggaggaacgacccgaagacccacgcggaggaggacgaggacacggccgcgggcaaggccccagcccaagcgggc

SEQ ID NO: 250481 - RNA, 83 nt, Homo sapiens
cgggaagaacagaagccgagacccacagcgccagcgccagacgggggagaccagcgcagcaccgcacgggccaggccggagac

SEQ ID NO: 250482 - RNA, 85 nt, Homo sapiens
agagcgacagcggcgagcagaacacggcgagcgggcagcccaggaggacaggcaccaagaaaaaccgaagcaccgaagacggcca

SEQ ID NO: 250483 - RNA, 79 nt, Homo sapiens
cagccagcagacaggaagaccaagacacccaggagaaagacagcggggaaaagaaaaaggagggggcaaaagggggcaa

SEQ ID NO: 250484 - RNA, 80 nt, Homo sapiens
gggccgggcgcgggcccacgggcccggggaggcgcggagccgcgcaacccgacagaagcgaaggggacagggggagaacc

SEQ ID NO: 250485 - RNA, 77 nt, Homo sapiens
agaggggcgaggcgagacccccgcccacgcaaacccaaagaccccgccggagacgagagagggaacaggcacgcccc

SEQ ID NO: 250486 - RNA, 62 nt, Homo sapiens
acgcaggagaccgacgaaaaacgaagagagaagaagaacagggagaaacccgagggacacca

SEQ ID NO: 250487 - RNA, 56 nt, Homo sapiens
acaggcgaaggagcggggccggagaggggaagaagagaagggagaagacaggggac

SEQ ID NO: 250488 - RNA, 70 nt, Homo sapiens
agaggagacccccagaaaaagccaacaagagcccgaaggaggaaacaggacagaccggagacgcagccac

SEQ ID NO: 250489 - RNA, 79 nt, Homo sapiens
cccggcggacgccccggggacaccaccgaccagagacccagcaccgaaacgaacggagaggcagacagcaaaggaggaa

SEQ ID NO: 250490 - RNA, 81 nt, Homo sapiens
gggccaaagggcgagggcacaaaaaaccacaccccccaccgaggaagagcgggagaaaggggcagcaggagcggagggccc

SEQ ID NO: 250491 - RNA, 82 nt, Homo sapiens
acaggaagcagcagagagccgcccccccggagccgagagaggccggcccccaccgagacgaaaccagacagagggcaagaca

SEQ ID NO: 250492 - RNA, 79 nt, Homo sapiens
gacgagccaacaggaagaaagaaccaacgaaacgcaggaggccgaagaaaggcccacgcccacaaaccaaaaacaaaag

SEQ ID NO: 250493 - RNA, 85 nt, Homo sapiens
cggccgacggacgccggaccgaggcccccccagcgccgccgcccagccagccccagggaagagacccggcccaggcggaaacagc

SEQ ID NO: 250494 - RNA, 73 nt, Homo sapiens
aaagaagccggcggagagcggagagggcgaaccaaagaaggaaggcgacccaaaaccacgaagcacaggcagc

SEQ ID NO: 250495 - RNA, 83 nt, Homo sapiens
ggccaaagccgcccagacggccaccggcgggaggaacaaaaggaagagagcgacaggacagaaggacacgagaagaggagcag

SEQ ID NO: 250496 - RNA, 74 nt, Homo sapiens
cacaacagcaagaaagcagcaaacagcgaccgccaagagacacacagggcaccagaccgacggaaccaaagccg

SEQ ID NO: 250497 - RNA, 108 nt, Homo sapiens
ggagagcccaaggccacaggaagccacagcaggccaccagccagaagacccaacagaggccgagacggcccagacgcgcggcacaggcacgcgcgagccggggcgacc

SEQ ID NO: 250498 - RNA, 81 nt, Homo sapiens
gcaagggcgcccacagagcccaaaaggcagcgaccggaagcagccagaaacccagcaagcccaggccacacacagagaccc

SEQ ID NO: 250499 - RNA, 81 nt, Homo sapiens
aacgaccgcggggaagaaggccgcgaaagcggccgccgccagacggaacggcagcggaaagacaccggggccagccccacc

SEQ ID NO: 250500 - RNA, 72 nt, Homo sapiens
gcccaaccgggccaaggaccacagccgagcagcaagacacagcagcgcaccccccacgggcagcagggggag

SEQ ID NO: 250501 - RNA, 81 nt, Homo sapiens
ggcgggagcgcgagggaggcacgagaagcccggcgacggaggaacgcaggcgcgccaggggcgacgagaggccaggggccg

SEQ ID NO: 250502 - RNA, 74 nt, Homo sapiens
aaagagagaccaaggaaacgggggcaaagcaaaaagggggacaacagagccgacacagccaagaagcagagcaa

SEQ ID NO: 250503 - RNA, 80 nt, Homo sapiens
ccgcgggagagaggacccccccccccccccaagggcggaaaacaccccaaaagccaaaagggaaaggaaaagaccaacaa

SEQ ID NO: 250504 - RNA, 72 nt, Homo sapiens
acaggaagcccaagcagcaaccaaaagagccaaggacccaaaaaccaggaaccaacggcccgggaccaccgg

SEQ ID NO: 250505 - RNA, 69 nt, Homo sapiens
cagacaaagcacaacgccaggcggagggggcgcggccggacaccagagaggaagagagaaggccacgcc

SEQ ID NO: 250506 - RNA, 69 nt, Homo sapiens
aaagacggcaacaacacaaccggacacaggagccccggcaagcagcagcaaaccggacccaggagcccc

SEQ ID NO: 250507 - RNA, 80 nt, Homo sapiens
acaacccgagagaaaagacagccaaagcaacaggggaacaaaggacagaccccacagagcccgggagaaacagacggccc

SEQ ID NO: 250508 - RNA, 56 nt, Homo sapiens
cggaagacgcccaccaacggaaacccgaccgccccaggggcacagcaggaccagca

SEQ ID NO: 250509 - RNA, 81 nt, Homo sapiens
gcgccgccgaccccccggcgccgcgccggcggcgggcggagaacggaaaagcaccaggaagcagagaggaccgcagaaggg

SEQ ID NO: 250510 - RNA, 39 nt, Homo sapiens
ccaaccagcagcagccacaggagggagaaaccagaagaa

SEQ ID NO: 250511 - RNA, 101 nt, Homo sapiens
ccaacacacgcagcggggggacacacgcgaccggcgaggcccaccaagccagacagaacagaaacccaggggaaagaccacaacccaggcccagccgaacc

SEQ ID NO: 250512 - RNA, 76 nt, Homo sapiens
cccaccgaaccacacccaggccgaggagcgagcgacaggcagaggaggcgagccccaccggaccacccggaccgga

SEQ ID NO: 250513 - RNA, 76 nt, Homo sapiens
ccaaagcccaaaccccaggccaagcaaccaccagcagcccccagagcggaacacaggcgcagggcgaaccagccaa

SEQ ID NO: 250514 - RNA, 70 nt, Homo sapiens
agcacacccccagaaggacccaggaccacccccacccccaacagggaaaccacgcagaagaaggaaagca

SEQ ID NO: 250515 - RNA, 80 nt, Homo sapiens
cagccaagaacaaagccccaacacgccaagacacggcaagggaggaagaagggcgccgaggccgagccccggcgagccaa

SEQ ID NO: 250516 - RNA, 81 nt, Homo sapiens
agagggcagaaacccgagccgggcagacacacacggaacacacaccagccgcgccgccaggcacagagaaggcaaacggga

SEQ ID NO: 250517 - RNA, 84 nt, Homo sapiens
cgcgacagcaaccgcacagccgcagcccccagcggcaccgcacccgggaccacaacacaaccgcaggaggccgggaagaaggag

SEQ ID NO: 250518 - RNA, 99 nt, Homo sapiens
cagcccccgaaaacgcacggagcgggcccgggccagaggcagaaaacggacggaagaaaaggcggccggaagaagaccagcacaaggaaaaccgaaaaa

SEQ ID NO: 250519 - RNA, 62 nt, Homo sapiens
aacaagcgagaccaaagcccagagcaagagagaccacacaacaagaggaaacccggaagcac

SEQ ID NO: 250520 - RNA, 72 nt, Homo sapiens
gacagccgaaggcccggcacagaagcccaacccgcagagaccaagcgaccaagcaagcagcgccgacaggca

SEQ ID NO: 250521 - RNA, 76 nt, Homo sapiens
aaagcccgccaagaggcggaaggccaaggcaccggcccccacgggcggcgcagggggagccaaagaaaaccagcaa

SEQ ID NO: 250522 - RNA, 77 nt, Homo sapiens
cccaggacgagacacacggcacacaccagcaggcgcagaacgagggacaaacacaagacacggacaggagacaacca

SEQ ID NO: 250523 - RNA, 77 nt, Homo sapiens
cggggagcgcagccaccaggcggccgggggggggcgaggggaaaggcaaagccgcgaggcgggacaagggcgcaccg

SEQ ID NO: 250524 - RNA, 72 nt, Homo sapiens
gcgggagagcccggcggcggagcgggggcaggcccaaaggaaagccacaaagaacacgagagacaggaagcc

SEQ ID NO: 250525 - RNA, 85 nt, Homo sapiens
aacacgcacacaagcgccgcagccgcccgaagagccaagagcagaccggccagccacgaagcagagaggaaaaccgccagaacag

SEQ ID NO: 250526 - RNA, 74 nt, Homo sapiens
ccccgcagcgacgcggcggcaagacggggcgggggccggaccaagggaacgcggaggagcccgggaagacacca

SEQ ID NO: 250527 - RNA, 79 nt, Homo sapiens
aagggcgggccacggaagccaccgacaggcccgagggcccgagagcaccgcgccagacagacagagcgcggcacgagca

SEQ ID NO: 250528 - RNA, 67 nt, Homo sapiens
gaggacaagaccacgagccagccccaggggcaggacagggggaaccagaaagcccgacgaaccagaa

SEQ ID NO: 250529 - RNA, 60 nt, Homo sapiens
gcacggacagggggaagaggcgccccacagacgacgacgaaaacacaccagacgggagcc

SEQ ID NO: 250530 - RNA, 75 nt, Homo sapiens
cccggcaccccacagcccagggaaggcaccaaaagggggggcaggaaaggcccccgcgggcgcacacaggaaggc

SEQ ID NO: 250531 - RNA, 68 nt, Homo sapiens
acaacaaaacaccgaaggaacaaacacccaaagcagccaggagccagcaaaaagaagagacgacaaaa

SEQ ID NO: 250532 - RNA, 81 nt, Homo sapiens
ccaccaccccgccagaagaggaaaaaggcagaagcccccggggagagacagacagagggacacagagaggaagaaaggagg

SEQ ID NO: 250533 - RNA, 71 nt, Homo sapiens
agaaagaaacaagaaagagccccaccgcacaggcgcacaacgagaacccacacagggaagaggcaaacagg

SEQ ID NO: 250534 - RNA, 77 nt, Homo sapiens
ggaccagggacacaacgcaacagggccaaaaccccgccaagaccaaacagccgcgaaccaaagaagagagcaagaga

SEQ ID NO: 250535 - RNA, 74 nt, Homo sapiens
gaacggggggcgaaggcaaggcacaaagcccgacagggcaacacccgacaaaggaggaggcgcggaggaggagg

SEQ ID NO: 250536 - RNA, 57 nt, Homo sapiens
gcgcgcggcccccacaccacacagagagcgagggaggcaagcaggggggcaaaggaa

SEQ ID NO: 250537 - RNA, 82 nt, Homo sapiens
gcggaggcgccgcccggggccccgcggcgcaggaggcggggagcgcagagcgggcgagcgcgagaaaaaccggaagggaaac

SEQ ID NO: 250538 - RNA, 80 nt, Homo sapiens
cagccgaaagaaacagaacagaagagggcaaggcaggaaaggagaaaggaaggcccaggacaacagcggaagggaggaac

SEQ ID NO: 250539 - RNA, 87 nt, Homo sapiens
cggaacaacaccgggggcggaagacccaagcaccagccgccgccacacccccccccggccccccgcggcggcggcggcggcaagagg

SEQ ID NO: 250540 - RNA, 76 nt, Homo sapiens
cccggacggcggcggggcggaggggaggaaggacaacggccaagagaaacaaagccccacacagagggaacggaag

SEQ ID NO: 250541 - RNA, 71 nt, Homo sapiens
cgggagagggcccagggcaagagaaagcagaggcacacccagaagccacaggagaagcaagaggcggcccc

SEQ ID NO: 250542 - RNA, 75 nt, Homo sapiens
aggaagcggggacacgcggccccagcgcccggccccccaccggacacccgcggcggggggggaagaggaggaggc

SEQ ID NO: 250543 - RNA, 87 nt, Homo sapiens
ccgccgaaagcccagacagaacagacccaggcagggccagcaaagagcggaacccaagaaggcagaagccagccccgcaggccgcca

SEQ ID NO: 250544 - RNA, 85 nt, Homo sapiens
cgagccagacgccaggacacccggaagcgggaaagcacaccgaggagaagaccaggggaacaccaaaaacggaaaaagaaaacga

SEQ ID NO: 250545 - RNA, 80 nt, Homo sapiens
gggcggcagcgcggacacccagccccaggacaaggaccaagaacaaaggagaagaaaccaagaagagaaaaacaaaaagg

SEQ ID NO: 250546 - RNA, 65 nt, Homo sapiens
cgcaggcagcagcagcacagccgcccccgccagagacacagagagcagcgcgaccggccccccgc

SEQ ID NO: 250547 - RNA, 66 nt, Homo sapiens
ggaaggcaagagccaacccaaaaccaacccagcaacgggagcagaaggaaaaaaaagcagaaacgg

SEQ ID NO: 250548 - RNA, 76 nt, Homo sapiens
gggcagaccccaagagaaaggagccccccaagagcggggggaaaggagaaggcggacgcagaaggcagagacgcaa

SEQ ID NO: 250549 - RNA, 81 nt, Homo sapiens
cgaagccacccagggaccccaagcgacgcacccgaagagcagggacaagcgcacccaagccaggcaagaaggagaaggaac

SEQ ID NO: 250550 - RNA, 73 nt, Homo sapiens
caggcgccgagccagccgcacggccagacagcggccagagaacccaaaagcaaacccaagaccgaaagaaacc

SEQ ID NO: 250551 - RNA, 74 nt, Homo sapiens
cccacaccccacgcacgcagaaggcggcagggagcacgcaccaggagcccacggcccacccacagcgaaacaaa

SEQ ID NO: 250552 - RNA, 73 nt, Homo sapiens
aaacagcagcgacaaaccgagacagcaagccagccagcccacacaagacacaaaaccagagcgcacgaaccag

SEQ ID NO: 250553 - RNA, 73 nt, Homo sapiens
gcggacaacacccaacagaaaacaacccgcaaaggagaaaacaagagccgcaaagaaaacagaaaaagcacca

SEQ ID NO: 250554 - RNA, 79 nt, Homo sapiens
caaaacagagcggaacgaacaagggacagggaaagcggaaccaccaaaaggaggagacaacgaccagaaaacggagcag

SEQ ID NO: 250555 - RNA, 74 nt, Homo sapiens
acgaagaagcgggccacccacaaacgccgggaccagggcagggaccccggaaccgaagggcgacaaagagaccg

SEQ ID NO: 250556 - RNA, 39 nt, Homo sapiens
ggcagagccgcaacccgaaccggacaacagaagcaaacc

SEQ ID NO: 250557 - RNA, 79 nt, Homo sapiens
gggcagccgcaacaggggagaagacgcgcgccggaccaagaagcagccacagaaacacgggcaggacacagagagaggc

SEQ ID NO: 250558 - RNA, 53 nt, Homo sapiens
gcccgcagaccgcagaaggccggagacaccagcagacccgagccgagggacca

SEQ ID NO: 250559 - RNA, 40 nt, Homo sapiens
aacccagcaccgggaggccgaggaggaagcgaaccagagg

SEQ ID NO: 250560 - RNA, 71 nt, Homo sapiens
gagcggaggccgcccccggaagccccgcgacgcggaagacagcacgcgacgagagggcacggccccgacgc

SEQ ID NO: 250561 - RNA, 64 nt, Homo sapiens
ggaaaggaaagggacccaggagagacgcaagaaggcccccgaagcggcccaacgcgggacacga

SEQ ID NO: 250562 - RNA, 71 nt, Homo sapiens
agacaggaagaagagagcggaacagcagagcgcacaacaacgaagaggagaagcaggaccaagacacgcag

SEQ ID NO: 250563 - RNA, 55 nt, Homo sapiens
aagacacggagcaaggaggaaaacacacggaaaaccaacagagacaacaaagaga

SEQ ID NO: 250564 - RNA, 74 nt, Homo sapiens
gggcgggagcggcaacgaccgcggggcgcagggggaaaccgaggaaccaagcgaaacgggagacgggcgcgacg

SEQ ID NO: 250565 - RNA, 58 nt, Homo sapiens
ggcgcgccggaaaccggagcgcgcagcaggacgccaggaaagcaggcagagcaacccc

SEQ ID NO: 250566 - RNA, 72 nt, Homo sapiens
gacgcagcagggggcgcaggagccccccggccccacccaaaagggcccagacccggaagagggggccccagg

SEQ ID NO: 250567 - RNA, 76 nt, Homo sapiens
gggagaaacaggacagaacaagcacccacgaggacagcaaacaaggagaagacagacgcgcggaccgggaagaggc

SEQ ID NO: 250568 - RNA, 70 nt, Homo sapiens
gaagggccggaaaccgaaacggggaaaaaaaccgcagggcggagagaccagggcaaggaaggcccaacca

SEQ ID NO: 250569 - RNA, 59 nt, Homo sapiens
gcagaacagccaagagcgggcccgggccaaccgaggggaaggagaccagggcccgacag

SEQ ID NO: 250570 - RNA, 57 nt, Homo sapiens
cagaaggagcgaagaagagggcaagaaggggggcccaagagaagaacaacaaaaccc

SEQ ID NO: 250571 - RNA, 82 nt, Homo sapiens
cagcgaagcgggcacggggcggcaggagacgcaaaacacgggaggaaggaggcaggcccaggccacccagcccacccacgca

SEQ ID NO: 250572 - RNA, 75 nt, Homo sapiens
gccgggaccaacaggggcaagacaagccagaacgagaagcgcaccacagggccccgcaccaccccagcaaccaaa

SEQ ID NO: 250573 - RNA, 50 nt, Homo sapiens
gccgcccgcaacaggaacagcgagcacccacgggagaccggggggcaaga

SEQ ID NO: 250574 - RNA, 76 nt, Homo sapiens
cccacccgaaaccacaaggccgagcaaaagcagaccggaaaacccaccggcaagaccacacccgaggggagcccag

SEQ ID NO: 250575 - RNA, 58 nt, Homo sapiens
agagagcgacaacaaaaaaaagagccgcagacgcacagcaaccaccggacccgaaggc

SEQ ID NO: 250576 - RNA, 74 nt, Homo sapiens
gcccagccccagcggcagacggaaacgacagaagcagaggaaaaaccagaagagaaaaaacaaaggggagaggc

SEQ ID NO: 250577 - RNA, 64 nt, Homo sapiens
gggaccacggacgaaaggcggaacagaagcgccggaagaaaagagcgaaaaaaggcggccgaac

SEQ ID NO: 250578 - RNA, 80 nt, Homo sapiens
gagccacggccacggccgcaaggcacagagaggagagcaccgaccggacacccgaagaagccagcgccaggaaaccgcag

SEQ ID NO: 250579 - RNA, 63 nt, Homo sapiens
caagcaccgccggggcgccgcacgagaccgggcggccagacaggccccgggaccaaggacacg

SEQ ID NO: 250580 - RNA, 62 nt, Homo sapiens
cgaccggccgcgacagcgaacagcgcggccgcaggaccaacgaggcaggggaacgaaagggg

SEQ ID NO: 250581 - RNA, 79 nt, Homo sapiens
cgggaggagacgagcaagaccacgacacccgaagccgggaaagagccaggacaaaaccaggcagaaccaacacgaaccc

SEQ ID NO: 250582 - RNA, 79 nt, Homo sapiens
cgacaagcgcgcaaagcgcgccccagaccaccggcagggaacagccgagcagaccgaggaggcccaccagcagacgcca

SEQ ID NO: 250583 - RNA, 72 nt, Homo sapiens
agaaccaccaggggacccaggccaccaccgcccagcaagacacggggggcacacaacccagccagccgccgg

SEQ ID NO: 250584 - RNA, 73 nt, Homo sapiens
ccgggggccaccaccgaggacaaacaacacccaacagcccaaagcaaaggagcaacagcccaggagaaaacgg

SEQ ID NO: 250585 - RNA, 76 nt, Homo sapiens
aggagaaggggacggaagagggcacccagccacagccgagggaggcagggaagcaaagagcacccgagcccagcag

SEQ ID NO: 250586 - RNA, 69 nt, Homo sapiens
aggaaaccacacaccgcacaaaagaagagacaagggcagagccaagcgccgcccgggcccaagcacccg

SEQ ID NO: 250587 - RNA, 84 nt, Homo sapiens
ggcggaagcggagagcaacagcgcgccgcagaccgaaaagggcggaaaaggaccaaggcccgcaaaagggcgcgaacaacaaca

SEQ ID NO: 250588 - RNA, 79 nt, Homo sapiens
ccccggaacagcgccgaggcccaaggcagaggcgaggcggaagggcaccccacccgcaagcagagcccagagaagagac

SEQ ID NO: 250589 - RNA, 76 nt, Homo sapiens
ccccgcggggaacgcgccacggaccgcgggacaagaaaacagcgacaagaacgagccagcaaacccgaggagccag

SEQ ID NO: 250590 - RNA, 58 nt, Homo sapiens
agcaagccccgcaccaccaacgcagcaccccggccaaggcccgggcgggaagaagaag

SEQ ID NO: 250591 - RNA, 59 nt, Homo sapiens
ggaccacaaaaaggacaccagcaagcgcaagaggagggccccccaaccgcaagcgccgc

SEQ ID NO: 250592 - RNA, 79 nt, Homo sapiens
gggccacccaaacgcccacaacagaacggagggaaagccgacacagcgagaacccaacaggcccagcgcccaagccggc

SEQ ID NO: 250593 - RNA, 72 nt, Homo sapiens
cagaaaccacaaaggacacacagcgaaggcacaaccaggcagagcaggacccacacgacacaagggagacca

SEQ ID NO: 250594 - RNA, 71 nt, Homo sapiens
cgaaaggagagagaaaagcagaggaagagccacaaccggagccaagaaggggacacggccgcagcggaaaa

SEQ ID NO: 250595 - RNA, 68 nt, Homo sapiens
ccggccgaaaggggagacaggcggccacaggaagaccgagaccacaggggcaacccaaggacgagacc

SEQ ID NO: 250596 - RNA, 83 nt, Homo sapiens
cgagccgggaggccggccgggccagcacccggccgagacggcggcagcagcggcacaggggaccaaaagaacccagccaaccc

SEQ ID NO: 250597 - RNA, 56 nt, Homo sapiens
gacccggacaaccagaggcagccagcagggggaggcagccccagacgggaaaaggc

SEQ ID NO: 250598 - RNA, 70 nt, Homo sapiens
gagaaaaggccaagaaggcaggacaaggcacgaggcgcggcgaccaccacagcagagcccggcgaaggag

SEQ ID NO: 250599 - RNA, 72 nt, Homo sapiens
acaggcgcgagaccagacccacaacgaaaagcccgaggccccccgcgcgggcggcgccgccccgcccccgcc

SEQ ID NO: 250600 - RNA, 82 nt, Homo sapiens
ccccggcacgggagcccacagagaccgaaaagcgcacccaccaagggacccggcagcaaccccaacaaacgccagaggcagc

SEQ ID NO: 250601 - RNA, 73 nt, Homo sapiens
cgagggacaagccccgagccgcgccgaccagcggagcgacgcaggagcacagcaagcgggagcaggcagacca

SEQ ID NO: 250602 - RNA, 80 nt, Homo sapiens
gcgacaagaggagcggcccccccaagaaccgaagcggccgcggaggaccgcccgcgcagagacaacaccgccaccaacca

SEQ ID NO: 250603 - RNA, 90 nt, Homo sapiens
cacacgagcccaggcacaggcacgcagggaagaaggagaaagggccaaccccgaagaagcaaacagaaacgaaggagacagagaagaacg

SEQ ID NO: 250604 - RNA, 76 nt, Homo sapiens
ggacaaggcggacgccgggagccgcgcgcacagccgggcgcgggaaggaggcacaggagagaggcaacaaggccag

SEQ ID NO: 250605 - RNA, 68 nt, Homo sapiens
ccccccaccccgacccacgcccggccccgacacgccccacgcgaagagaagaagcaacagacaaaagg

SEQ ID NO: 250606 - RNA, 73 nt, Homo sapiens
cgcggcgagcggcccgcacaaggccggcaggcagaggccgcgcgaggaacaacgaagagcaggacccagaaag

SEQ ID NO: 250607 - RNA, 84 nt, Homo sapiens
agcaagcagagagagcgaagagggccagggcccaagcgcgcaagagggcacaaccgcacacagcacggaaaagaggcgcaggga

SEQ ID NO: 250608 - RNA, 57 nt, Homo sapiens
cagccaccagcagcccccagagcgggaccacaggaaaacccccaacggagacaacga

SEQ ID NO: 250609 - RNA, 77 nt, Homo sapiens
agaagaaaggaaaggcgaaaacagcgaagagaaagaaaaaggcacgacgaagcaaaagcagggcagcccccaccacc

SEQ ID NO: 250610 - RNA, 81 nt, Homo sapiens
gagagcccaagaacaaagcgccccaaaagcaaaagcagaccggaaaacccaccggcaagaccacacccgaggggagcccag

SEQ ID NO: 250611 - RNA, 78 nt, Homo sapiens
cccccaggacaacccagaggcaacaaaggcgagacacagacgcggccaaccacccaaagaggagcaaccaaggggaaa

SEQ ID NO: 250612 - RNA, 79 nt, Homo sapiens
gaaaccaaccggaaaggagaaaacaaaccgacacgaaagaaaagccgcaggcaaaaggagaaagacagcaaagaaaagg

SEQ ID NO: 250613 - RNA, 75 nt, Homo sapiens
gacccagaggcagagccgccccagcagcaggggcgccagaagggagcgacgaagggggggggacggagcccgagg

SEQ ID NO: 250614 - RNA, 74 nt, Homo sapiens
aggcaggacggcaaaagcggagcccggagcccagagccgaggagaaggcgaggacgcgggagcacagacagccc

SEQ ID NO: 250615 - RNA, 72 nt, Homo sapiens
cgacgagacgaccaaaaaaagcgaaaagcggcaagaacagccagaggaacagaggagaagaaagaaggcgaa

SEQ ID NO: 250616 - RNA, 74 nt, Homo sapiens
cagaccaagaccccaggcaggggggcgccaaaggacccacccaggaggcagaaacacgccgcgcgccacaccag

SEQ ID NO: 250617 - RNA, 33 nt, Homo sapiens
cgagaaggcagaggcggaagcagaaccaaccag

SEQ ID NO: 250618 - RNA, 73 nt, Homo sapiens
ccgaagcgaaagggaagacagggccagaaccagagaaggaaagcaaagcgaccaagaaaagcgaaccagacgg

SEQ ID NO: 250619 - RNA, 82 nt, Homo sapiens
gcggggagaaggccacacccaggcagcaagggcaccgcgagcaagaccccgaagcagcacagacgcagacaaccaggcaaca

SEQ ID NO: 250620 - RNA, 103 nt, Homo sapiens
gaaaccggacagcagaggaaacgagggacaacacagacccaccagcagagcgcacacacaaaggggagccaggaagaagacaaaacagagaggaagcagcacc

SEQ ID NO: 250621 - RNA, 71 nt, Homo sapiens
cgagacaaacagccaaggcccacggggcagagccaccagcaggaggagaaccaagcagccacaaaagcaaa

SEQ ID NO: 250622 - RNA, 80 nt, Homo sapiens
cgcgccgccgggacccccaggacgacggaccggacacaccggaggaaccgacgggaggcccagagcagaacgccgcgaaa

SEQ ID NO: 250623 - RNA, 62 nt, Homo sapiens
agcccggacaccggaagcgggaaagaacccagggaccagggcgccccaggccaacccgggcg

SEQ ID NO: 250624 - RNA, 88 nt, Homo sapiens
cccgccccagcagaagagaacacaccacagccacagcacggaagcaaagaccagaacaaacagaaggaagccagcagccaagccgggg

SEQ ID NO: 250625 - RNA, 55 nt, Homo sapiens
cccccaaccagcaaccagaccacgcccgaaggagggacccagacacccccgcagc

SEQ ID NO: 250626 - RNA, 75 nt, Homo sapiens
gggggaagaggacagcacaaagaaaagggccaaaagagaaacaggcacgacaaccaaagcggacccaggaaacac

SEQ ID NO: 250627 - RNA, 78 nt, Homo sapiens
cagcacgggcagccagagaaacggaaccagaagcagagccaacagaccgaacaaaggcccgacccgaaaagcgcagcc

SEQ ID NO: 250628 - RNA, 82 nt, Homo sapiens
caacaggaaaacaaaagaggagaaagagcagcggaaagagccaggcagaaagccggggggagggaccgccccagaggacgga

SEQ ID NO: 250629 - RNA, 54 nt, Homo sapiens
cgccaacgacagcgcggccaacacaaccaagcccaaaagagcacagaagagggc

SEQ ID NO: 250630 - RNA, 75 nt, Homo sapiens
ggacccagagggggggaaaaccggagaagccccacccaaaggcgccaggcgcaacccggacgaggggcaggaccg

SEQ ID NO: 250631 - RNA, 79 nt, Homo sapiens
agaggaccggggaaggcaggggcggggcgccgccacccagaaagaagcaggcgagacagccggacaagccaggaagaag

SEQ ID NO: 250632 - RNA, 81 nt, Homo sapiens
ggaaccaggaggggagaagcggggcccggcgcacccaccaccgccgcccacggcagcccagggacccgagcaccgccggcc

SEQ ID NO: 250633 - RNA, 78 nt, Homo sapiens
agacggcaccagaaccccagagcccaagcgcaagaagcaggagccggcacgggcaaacggaagaacagcacagggcag

SEQ ID NO: 250634 - RNA, 86 nt, Homo sapiens
cggcgaacgcggagagcacgccagaaggcccgggcacgggagcagcagccccgagaaggaagaggaggaagcgagggcccgcgagg

SEQ ID NO: 250635 - RNA, 38 nt, Homo sapiens
agcggcgaacacgccgacaggggaagaacagacacagc

SEQ ID NO: 250636 - RNA, 41 nt, Homo sapiens
acagcggaagcaagcaagccagaaccacaagaccgcaagcc

SEQ ID NO: 250637 - RNA, 71 nt, Homo sapiens
ggcgagaagagaagggaagaaaacccgcccagcaagcaggacacgaccaacaagccaaagaccacgggggc

SEQ ID NO: 250638 - RNA, 55 nt, Homo sapiens
gagagaaagcaagcaaaggcacgaagagccaggacaaacccaccgacggggaaaa

SEQ ID NO: 250639 - RNA, 78 nt, Homo sapiens
gacagggagcgagagcggagaagcgggaggagaccacccaaacgcggcacgggagagggagacgcgcacggaccggaa

SEQ ID NO: 250640 - RNA, 62 nt, Homo sapiens
agacccggggacccccgacgccaggcagcgcccccaaacgggggaaggccacaccccaaaag

SEQ ID NO: 250641 - RNA, 52 nt, Homo sapiens
gagccacgacacagggcccagcgggaaccagcaggccgggcacccgaccacg

SEQ ID NO: 250642 - RNA, 90 nt, Homo sapiens
cagcccccgagggcgggaacaggagaccggaaagaagggagaccgcggggaaaagagaaaggccaaccaaagaccaggagaaccagcgcc

SEQ ID NO: 250643 - RNA, 60 nt, Homo sapiens
acaaacaggaacccagcaaccgggacagacaccacaacgcgagcccgcgcccaggcggag

SEQ ID NO: 250644 - RNA, 75 nt, Homo sapiens
ccagagaccgcagcaaccaacggcagaagaaacgcgaaacaggggcaaaagcagggccagcgcgaccacgagcgc

SEQ ID NO: 250645 - RNA, 65 nt, Homo sapiens
aaaaggaagcacaccaaggcagaagccaaaaagcaggcaccaccaaagaggggaaaagccagagg

SEQ ID NO: 250646 - RNA, 63 nt, Homo sapiens
acaccaccaagagggaaaaagaaccccacagaccaagcccggggggcgaccgaggaaaaaaag

SEQ ID NO: 250647 - RNA, 80 nt, Homo sapiens
ccacggacagcgacccagaacggcgacaggagccaggccggaagaaacgcggaccgcggagggccggagagcgggaccca

SEQ ID NO: 250648 - RNA, 82 nt, Homo sapiens
aaaaggaaggaacccccaaacaggagcaccgcggcgcaaaagaaaacgacagaagcacgacaacaacgggcagcaagccaca

SEQ ID NO: 250649 - RNA, 89 nt, Homo sapiens
aaacccgaggacgcggggaacagacaccgcaagaaaaaaggggagacacgcgaaagcaaaccgaggagccaaccgaggcaaaagaaaca

SEQ ID NO: 250650 - RNA, 77 nt, Homo sapiens
ggcccagcaacaacaaaccagaccgaaagaaaaggcggagggccgcaaagcagcggaggaagccgaaaaaccaagcg

SEQ ID NO: 250651 - RNA, 63 nt, Homo sapiens
gccgcgaggaggcgcgggagggcgagaacgaccccgagacggcccggcaccaagggccggaac

SEQ ID NO: 250652 - RNA, 66 nt, Homo sapiens
aacgggacgcaaaaaaacaagaagggaggagaagggcccgaagcgggaaggcgagagccaaccaga

SEQ ID NO: 250653 - RNA, 73 nt, Homo sapiens
cgaaccggccgcaccgggggaagagacaaccgcgacacaaaaacacgcaggaggacgagcaacaaagaacgaa

SEQ ID NO: 250654 - RNA, 75 nt, Homo sapiens
gagcgcagcgcgaccgggaggcccaggggagcccagcagcgacagcggcggggagacggaggaagacacgccaga

SEQ ID NO: 250655 - RNA, 78 nt, Homo sapiens
aagagacaggaccccacaaagaccaagacacccaggagaaagacagcggggaaaagaaaaaggagggggcaaaagggg

SEQ ID NO: 250656 - RNA, 49 nt, Homo sapiens
ccgagagacccaagaaacaggaaaaagcagcaaagggagaaaagaaggc

SEQ ID NO: 250657 - RNA, 38 nt, Homo sapiens
cgcgaggaggaaaggaggacgagagcgccggcccaggc

SEQ ID NO: 250658 - RNA, 77 nt, Homo sapiens
cagacgagagacagaggcgaccgcgcggcagcgacaagcccacgagacgaacccccagccagcacacgcgagacagc

SEQ ID NO: 250659 - RNA, 76 nt, Homo sapiens
ggaggagcgacggccagcgcgcacaggcagccccccaagaagggaggcggagaagagaggaaccaggcaaggcacc

SEQ ID NO: 250660 - RNA, 60 nt, Homo sapiens
acgggacaacaaaagagccacccaagacacacgcccggaggaggaggcacggcccagaag

SEQ ID NO: 250661 - RNA, 65 nt, Homo sapiens
gagccgcggaaccgcgcggcacacaaccagagcgaggccgggcagggcaaaacaacagagggcca

SEQ ID NO: 250662 - RNA, 94 nt, Homo sapiens
ggaggacggggccgggcgaccgggcaccagcaggacccgaggccaggagccaggggcccagaagccaagccgacagcggaagaacaaaagaaaa

SEQ ID NO: 250663 - RNA, 67 nt, Homo sapiens
gcgccagcccaggaaaggcgccgaagaggaaagcccaggaaagagacacgcaaagaagaaaaaaaac

SEQ ID NO: 250664 - RNA, 87 nt, Homo sapiens
aagcaggcaaagacggcaaaagcacaaggaccgcggacagagacaacaccgagagagaaagacccagagaagacaggcccagaaaag

SEQ ID NO: 250665 - RNA, 55 nt, Homo sapiens
acaacaccgccggagacagccaaggaacggccgagcgaccaggagaggagccccc

SEQ ID NO: 250666 - RNA, 71 nt, Homo sapiens
acaggaaggccagggaagccggacgccgccgggagggagcccaaaaggcagagcgaggagagaagaaggag

SEQ ID NO: 250667 - RNA, 81 nt, Homo sapiens
gaagaacggacaagaaaggaggaggagaacgagagaggagcgagaggaagcggaagaaaaccaacaaaggacagcgggagg

SEQ ID NO: 250668 - RNA, 79 nt, Homo sapiens
gggagcgccggagcagcggacccaggcagggcccaaacccgagcccgcaagcagagaccgggagcaaagaggcagaacg

SEQ ID NO: 250669 - RNA, 76 nt, Homo sapiens
acaccagcgcgcagacccggccgcccgagaggaagggcggggggggggggccgagccggcccggcggagagggacg

SEQ ID NO: 250670 - RNA, 58 nt, Homo sapiens
caaagggcagaacacaagcgcaaagaggcacagccgccagggcgcggcccaagaagga

SEQ ID NO: 250671 - RNA, 62 nt, Homo sapiens
cccgacagccgcaaaacagaagagacgccaacagaccggggagaagggaccgcgggagcagg

SEQ ID NO: 250672 - RNA, 78 nt, Homo sapiens
aggacaagcacccggggggcgcaccagaaaggaaggcaaaccgacaccagcgacacaagcgcgagggaaccacagagg

SEQ ID NO: 250673 - RNA, 58 nt, Homo sapiens
ccaagcaccaagaaaacgccaaggaacggccggagcgcgaagacgcagggaaagcggc

SEQ ID NO: 250674 - RNA, 106 nt, Homo sapiens
gaccggacccggaagcggcagcgaggagacccggcgccgccaggccgacgaaaagcccaagagacacggggcgccaggcccaggcggcgaacccaggccaaggaga

SEQ ID NO: 250675 - RNA, 60 nt, Homo sapiens
cgagcgcggacggccaggccccgggccagaagagaagcgaaggacgacagccaggggagg

SEQ ID NO: 250676 - RNA, 69 nt, Homo sapiens
gccaagaagacaccccggccgcagcccgagccaaaaagcaccacccccaaccgggaggcacggaggaca

SEQ ID NO: 250677 - RNA, 79 nt, Homo sapiens
gcacgggcccggggaaaaggaggagaggcggcggccgacacccaaaccgccggcgcggaagaggccggcggcgggacgg

SEQ ID NO: 250678 - RNA, 74 nt, Homo sapiens
gagcgcccggaggggagagagcggaggacagccgagaggagggggggccccagcccggccgaacgggcgcacga

SEQ ID NO: 250679 - RNA, 104 nt, Homo sapiens
gggccgggcaaacacaaacgcgcgaccccccacagcagagagagcaagcgaaaaacccggaggggacaagagggaaaacgaaagagaaaagcagggacggagag

SEQ ID NO: 250680 - RNA, 54 nt, Homo sapiens
aaaacccgaggcaaagcgaggcgaagagaggaaaagacacacaagccagagggg

SEQ ID NO: 250681 - RNA, 65 nt, Homo sapiens
cacaacccccaaccacaaacaacacgaccaaggagggaacaggggggcgcagacgcccccagacc

SEQ ID NO: 250682 - RNA, 81 nt, Homo sapiens
ccgggaccggcgcccccccgaacaccagcaggaaaaaagagcggcagaaggccaaacggccgagcaggcgagcgaagagac

SEQ ID NO: 250683 - RNA, 85 nt, Homo sapiens
aagagacccaggggaagacccaaaggcagcaaaaacaagagccccaaagcagccaaaagacccaacagaggaagccgcaagaaac

SEQ ID NO: 250684 - RNA, 98 nt, Homo sapiens
gcccggaccgcagaagggagaccacagcaagacgccgggaccccggaaaccagaaaggcccagggcagccggaaagccaaacacgaaaaaaagaggac

SEQ ID NO: 250685 - RNA, 84 nt, Homo sapiens
agagcagagaaccggcgccgccaaacagcccagccgcgccagcgcccggcgccgcgcgccacccccgaggggcggacagaacac

SEQ ID NO: 250686 - RNA, 75 nt, Homo sapiens
gacaaggacaaggccaccagcaccaggcgccaagaaggcccgcccagggcaggccagaacgcggccggagccccc

SEQ ID NO: 250687 - RNA, 31 nt, Homo sapiens
cagaacgcaaagacggaagacaaacagaccc

SEQ ID NO: 250688 - RNA, 79 nt, Homo sapiens
gcgcaggcggcgcggagagggggcgcgagcggggggcccggaagaaaacccgcggccaggcgaggcggggggcaagaca

SEQ ID NO: 250689 - RNA, 75 nt, Homo sapiens
cagggcgcccagaagagacaggaggcgacagacccacggcagggcaaccccaccgcggaaggcaggcacacagac

SEQ ID NO: 250690 - RNA, 84 nt, Homo sapiens
aggcaagaaaacaagccagggccccacgacacaacggggaaccgcaggcggaggccccaggggaggcaaacgccggcccgcccg

SEQ ID NO: 250691 - RNA, 77 nt, Homo sapiens
gagcagaggaaccaacaaagaaggagcggaaaaccaggaacggccagggcaggcaggggcagaaggcgacccagcgc

SEQ ID NO: 250692 - RNA, 37 nt, Homo sapiens
gcgggagcaaagcaaaaggaagcgggaaggcaagaag

SEQ ID NO: 250693 - RNA, 57 nt, Homo sapiens
agagaagaaccggagccggagagaaaacgaaggaaggaggacccgaggagagagaag

SEQ ID NO: 250694 - RNA, 58 nt, Homo sapiens
aaagaagagcagcacaagcagagcggagaccgcccacaggaaccaacccccacgcagg

SEQ ID NO: 250695 - RNA, 50 nt, Homo sapiens
agcaccagagagaaaagaagaaccaggaagcagcgccacgccaggaggcc

SEQ ID NO: 250696 - RNA, 67 nt, Homo sapiens
cggccagacagcggagaaaacccaaaccgaaggaagggcaagaagaaaccaaaagcgagaaaggcag

SEQ ID NO: 250697 - RNA, 82 nt, Homo sapiens
ggcgcggagcgcaccaccagggaaggccaagaccagaccaagggccaagcagaaacgaaacacaccaccaggcgcccgaagg

SEQ ID NO: 250698 - RNA, 67 nt, Homo sapiens
ccggagagccccggaagacccagggaagagaagcaagaacggaagcacgggcggaggaaagcacaag

SEQ ID NO: 250699 - RNA, 66 nt, Homo sapiens
accaaggagcaccaaaaagaagaaccgcgccaagagcggcagcaggaaaggaggcaagccagaaag

SEQ ID NO: 250700 - RNA, 81 nt, Homo sapiens
ggagaaccccacggagaaccagagagccaaggacaggaacgcgggcccgcagccaacaaacaaaaagaaaaccaaaaaagc

SEQ ID NO: 250701 - RNA, 73 nt, Homo sapiens
gcaaaccacaggagaggagccccagggcgaagacccccccccagggcaaaccaccaggcaagaagaccccgcc

SEQ ID NO: 250702 - RNA, 83 nt, Homo sapiens
agaacaggccggaggggacccacggaccaggaagggaagaaggggcaggacaggaagacagacagagaacggacagggcgagg

SEQ ID NO: 250703 - RNA, 77 nt, Homo sapiens
agcaccgcccgagagcggcccaggagcacgcaccccgcggcggggaaaggccgcaaccaagagaggggcggaaaggg

SEQ ID NO: 250704 - RNA, 77 nt, Homo sapiens
aagggaggacgcgggacccccaaaagcgggaaaggcgcgcggccgcaagaaaaggacagacgcaacacaggaaacaa

SEQ ID NO: 250705 - RNA, 72 nt, Homo sapiens
cgggagccagaagcacaggcccgggcgaaggggccacgcgaggccggcaccccaaggggggcgccgggcccg

SEQ ID NO: 250706 - RNA, 114 nt, Homo sapiens
cggcggcgcgcgggggcgacgcgcgggaacaacgcgagcggcgcgcgggacgaagggacgaacagcggggacgccccagcagaccgcccaggagaggaaagcaggaggaaagac

SEQ ID NO: 250707 - RNA, 82 nt, Homo sapiens
cggagagcagcagccgcccgccaaccccaggggaccagaggaaccagcccgagcgcgggaaggcaaagaagaagcgcccaca

SEQ ID NO: 250708 - RNA, 76 nt, Homo sapiens
aggagcggccagggggaggcccgacggcgcggggagagagccaagcaaccaagccaagggcacacccccccagggc

SEQ ID NO: 250709 - RNA, 73 nt, Homo sapiens
acaaaagaggcgaaggcagaagagaacaaaggaaggagaaagaacgggaagggagaaagacccggaagaggaa

SEQ ID NO: 250710 - RNA, 72 nt, Homo sapiens
gcacacggcacgaggagccagacaagggacaaggaccgacagcccccaggaaggaggcggcggccgcgagag

SEQ ID NO: 250711 - RNA, 74 nt, Homo sapiens
ccaaggccaaagaggacgggacacgggccaagggagcgaaaagaacccccaaaagggagacggaagcggaagca

SEQ ID NO: 250712 - RNA, 69 nt, Homo sapiens
gaaacagaggagagaacacggagcgcaacggcgacagagagacaggaagaccagaaagcagcagaaaag

SEQ ID NO: 250713 - RNA, 100 nt, Homo sapiens
cagcccagccagccgccaagaacgcagcagcagccgccaagacgagacccgaggacacacacaccccgggcgaggagcgcacgggaaggaaaccagcgga

SEQ ID NO: 250714 - RNA, 77 nt, Homo sapiens
gaaaggagcccgggcgcgggggcggcggcagggggcggagcggaaggaagacccacaagagaccacgcagagacagc

SEQ ID NO: 250715 - RNA, 58 nt, Homo sapiens
cggacaggagccgccgccgccaacaggacaaaacagaggacacgaccgagcaagcgga

SEQ ID NO: 250716 - RNA, 74 nt, Homo sapiens
cccagacacagacgagcaggggaagggaaacacacagaagaccgcagaccaagggagcagggcgggggcaccag

SEQ ID NO: 250717 - RNA, 35 nt, Homo sapiens
agagaagcaaagaagcagaccaccgcccacgaagc

SEQ ID NO: 250718 - RNA, 74 nt, Homo sapiens
cgagaagccagcacgccgggagcggacacagcccagggaccccgacggagagacaaagaagacggagggggggc

SEQ ID NO: 250719 - RNA, 79 nt, Homo sapiens
cagcccacgggaacaagaggggacagaaagggagaagagcaaccggacacagaaggggaaggaaaccccaagcagcaga

SEQ ID NO: 250720 - RNA, 71 nt, Homo sapiens
acacgacgcacggggccaaaacagacccacaacagggaaccaaaacaggcccgacacgcgacaggacccgg

SEQ ID NO: 250721 - RNA, 71 nt, Homo sapiens
gcagcacggggaacgagggaaagaccaggagcaggccaagggcgcagaaaacgccaacgaagcaaagggac

SEQ ID NO: 250722 - RNA, 66 nt, Homo sapiens
accgccggccgggggacgagccggagcagcagccagaccaacgggagccgcaaggacaacagccgc

SEQ ID NO: 250723 - RNA, 44 nt, Homo sapiens
ccaggagcccgagagagaaggccaaccgccgaaaaaaggacaaa

SEQ ID NO: 250724 - RNA, 77 nt, Homo sapiens
gacaagccccggagcgcggccgagcaccgcaagaaaccagagaaggaacagccagaagaagacaggcgggaagagcg

SEQ ID NO: 250725 - RNA, 72 nt, Homo sapiens
aggcacagggaaagggcggccagacccaccacagccaacggcacaggcaggcagaaaagcccacgcccacca

SEQ ID NO: 250726 - RNA, 82 nt, Homo sapiens
gcgagcccgcggaaccgcagccaggagccaaaaaccgaacacccggaaggggacaagggacggcgaacagaccccgcgcggg

SEQ ID NO: 250727 - RNA, 75 nt, Homo sapiens
cccgggacagacagggaagacagggaaaagcaggcccagcacgacaaacaggacaaacgggacagcggaggaccg

SEQ ID NO: 250728 - RNA, 86 nt, Homo sapiens
cgaggagcaggaagagaaaccaggccagaagcggacccagaagaggggagcagcaaggaggaagacagccggggccggaggggagc

SEQ ID NO: 250729 - RNA, 67 nt, Homo sapiens
ggagcagggagaagagaaagagacgcagggaccccgggagggcccagcaaccggccagcgaaccgga

SEQ ID NO: 250730 - RNA, 74 nt, Homo sapiens
accgccccggccaggaacacagacgggggcgagcggacccgcagccccaaaggcggagaacggaaaagcaccag

SEQ ID NO: 250731 - RNA, 68 nt, Homo sapiens
ccggccgggccggccagcgccggaaaccaacaaaagaagacaagagcagacgagggagaagcgggcaa

SEQ ID NO: 250732 - RNA, 58 nt, Homo sapiens
aaaagcagaggacgcggaaacgcagaaaagcgagagagagaaaccccgaaccaaacag

SEQ ID NO: 250733 - RNA, 52 nt, Homo sapiens
ccagccgcagaggaagacccgacgaaaaagagccacgcccccacgagcgccc

SEQ ID NO: 250734 - RNA, 81 nt, Homo sapiens
ggagccgggccgggcagcagcagggcgccggaagacgaccccgacgcaggccaggagccgcggacagaagccgagcacggc

SEQ ID NO: 250735 - RNA, 74 nt, Homo sapiens
gccgaaagagcccgacaaaaaaaacgccgaaagaaccagccggcaaaagaagccaaaccagggcagagaagggg

SEQ ID NO: 250736 - RNA, 84 nt, Homo sapiens
agaagggaagaagcggagagaaacggaaaagagaaaaacaagcgaaaaggaagaaaagcagaaaacaaagaaaaagaaacaagg

SEQ ID NO: 250737 - RNA, 80 nt, Homo sapiens
accagggggcccccaggaccgaccgggccgcaggagggaagcgcacggaaaccgccccgggaggcacagagcaggagacg

SEQ ID NO: 250738 - RNA, 79 nt, Homo sapiens
gcaaaggagagcaggagaaaaacggcagcaggaaggccaaccgaaccgggcggcgccagaaaacgaagaggagaagaca

SEQ ID NO: 250739 - RNA, 73 nt, Homo sapiens
ccccggagaaaaggccaagaaggcaggggcaagacgccaagagaaaaggcgagagcacaaagcaccaagagcc

SEQ ID NO: 250740 - RNA, 76 nt, Homo sapiens
acgcagccaaagacgcgcccagaggggagcagaacccaacaacacagagggggcaggagcgccaagagaagaagaa

SEQ ID NO: 250741 - RNA, 81 nt, Homo sapiens
agcggaaacagcagagccaccagccaagaccaagcgcgaaagcgccaaaaggacagcagcccggaccgacaggaaagaagg

SEQ ID NO: 250742 - RNA, 81 nt, Homo sapiens
cagccgggacggagaccaaagcccgccacaccggaacagacaagcagaccggaagaccgacggaagaccacaccccgaggg

SEQ ID NO: 250743 - RNA, 74 nt, Homo sapiens
ggacggaggagcaggcgagaagagaagggcggggggaaaagcggcgcaggagaccagacccaaaacgcccaaac

SEQ ID NO: 250744 - RNA, 74 nt, Homo sapiens
caacaccaccccgcccgcagcaggcgagaacgcggacaagcaaacaaagaggaaaaagagggcaacagcgaagg

SEQ ID NO: 250745 - RNA, 72 nt, Homo sapiens
aaagcaccgaaaaaacgaagaacgaaacggagaaggaacgagccagcagcggacaccagaaaacaaggagac

SEQ ID NO: 250746 - RNA, 71 nt, Homo sapiens
cggacaccaacgagcgaagcagccaaagcacagcaaaccagggccaagggaagaagaacagaagaaaccga

SEQ ID NO: 250747 - RNA, 71 nt, Homo sapiens
gagcaaacgccaggacccacccgggcaaagaagagcaaagggagcaagggacgcaagacagagagaagaaa

SEQ ID NO: 250748 - RNA, 82 nt, Homo sapiens
ccgccaagaagcgcccacgcagcagccggccgggcacagacagcccaccgggcacacggagaccgggcacgccgggcaaacc

SEQ ID NO: 250749 - RNA, 86 nt, Homo sapiens
cggccccgcccgcgccggaagagccacgccgcgccaaggggccaagggagagcggggccccccccaaggcaccccccggcggaacg

SEQ ID NO: 250750 - RNA, 79 nt, Homo sapiens
aggcgccccacgcaccgcggaccggaaccgagcggacgacccccagaagggcagcacaggcggagaacggaaaagcacc

SEQ ID NO: 250751 - RNA, 76 nt, Homo sapiens
gagacccaaggaggggagaagagaagaagacaaggacaagaagacgcagaacggagagaagccaggaacagggacc

SEQ ID NO: 250752 - RNA, 74 nt, Homo sapiens
gccaaggggagaccacaccaagcgggagacacaccacgccaaggaacaaagggcaaaggacacaccgcacaaac

SEQ ID NO: 250753 - RNA, 69 nt, Homo sapiens
gccggaaacaagacaccgaaaggaccaaaaggaaagaagacggaaagcagagagacacccggccaaccc

SEQ ID NO: 250754 - RNA, 77 nt, Homo sapiens
ggcaacgggcggggcggagcgccgggccgcgcagcgccgaacgacgggccacagccagaacggaagaccaaccagaa

SEQ ID NO: 250755 - RNA, 79 nt, Homo sapiens
gcagccgaggcgcccccgcgcgagagcccagaccccacagccagccgagggcgagaagcacagaaacccgcagacaccc

SEQ ID NO: 250756 - RNA, 83 nt, Homo sapiens
gaacaccgcgcgggaagaagccagaaagcgacggaagcgcaaagggcgagaagacagaccgggagccagagcagcagcgagcc

SEQ ID NO: 250757 - RNA, 68 nt, Homo sapiens
agcccagggccacagccaacccaacagagggaaaacgacaaccagccgcaggcgaaagcacgaaggac

SEQ ID NO: 250758 - RNA, 84 nt, Homo sapiens
agaacgcagcaagcccaggcggcggggaaaggcagaagaaaccagacaagagcggagaaaaaagaaacgccagaacgcgcggag

SEQ ID NO: 250759 - RNA, 77 nt, Homo sapiens
aacagaaggagcggcggacacacagacccccaccaagcagccacagcacacggggacgcagccgcgggagggggccc

SEQ ID NO: 250760 - RNA, 115 nt, Homo sapiens
accgcaggacgaagcgaggcgaaacagaacaaccccacggaagaagagggccaaccagcacgagaccggagagcaaggggacccgcacacgcaacccgccccagggcaagggccc

SEQ ID NO: 250761 - RNA, 77 nt, Homo sapiens
aaaacacaagaaggggagcagggaccagagacacaaccgaagagcagggaaagccacaaagaaggggaccacggacc

SEQ ID NO: 250762 - RNA, 78 nt, Homo sapiens
gaaggggaagaggcccacccggagaaccccacggagaaccagagaaagaagccggcgccccaacccaccggagccccc

SEQ ID NO: 250763 - RNA, 81 nt, Homo sapiens
ccccgaagcacacagaaagccaacaagcccaaaggaaaagcgaccaagaaaagcggaaaaacaggggaaggacagcacaga

SEQ ID NO: 250764 - RNA, 51 nt, Homo sapiens
acgcagggcgcccccggccggcgacgacgacgacacccggcacagccaacg

SEQ ID NO: 250765 - RNA, 76 nt, Homo sapiens
cgagcccaggagcgccacgcgcggaaggcagcgcccagcagcgcagccacaaacccccccacgacaccgaagcagc

SEQ ID NO: 250766 - RNA, 75 nt, Homo sapiens
agcaagagcccgacgaagggaaaacaagcaagcgccacagagcagggggagaccagaaggccgagcccacagaga

SEQ ID NO: 250767 - RNA, 66 nt, Homo sapiens
aagggcaggcacagggcaaggggggaggggaacagcagcggagaacacggcagagacaaaacggac

SEQ ID NO: 250768 - RNA, 83 nt, Homo sapiens
gaccacagcacccagacaacaacaaaccaggacggccgagccggaggaaaagagcaaccccaagggcgggagggcgggcacca

SEQ ID NO: 250769 - RNA, 78 nt, Homo sapiens
cggggccagcccaccgcccccacacggcccacacccacacgcaccgccgaggagaaggcagagcccccccaggcagaa

SEQ ID NO: 250770 - RNA, 83 nt, Homo sapiens
cggaggcagggacgaaggcacaccacagcgcgacacgcccaccaagaaagaaccggaaaggggaccgggccaggaaagcagaa

SEQ ID NO: 250771 - RNA, 71 nt, Homo sapiens
aggaggagaacagaagaagcgaaccgggggagaaagaacgggcaaggaaacaggaggcccccccagcgccc

SEQ ID NO: 250772 - RNA, 80 nt, Homo sapiens
aggacagagacaggaaaacagaaacaggaagaggaacgccggaacaaagaacgcaccaagcagaccagaagcaaaagccc

SEQ ID NO: 250773 - RNA, 79 nt, Homo sapiens
ggcggccagacccgaagccgcgccccgcaggcacccgggcccccgcccggcaagaaggaacagacaaaaacggccggaa

SEQ ID NO: 250774 - RNA, 65 nt, Homo sapiens
acaaaggaacgccacacgcgaaaaacggacgccgccagccaccggcgcgaagccagaccagacca

SEQ ID NO: 250775 - RNA, 82 nt, Homo sapiens
cacaaaaaaggaagcccacagaaaggcccaggagaacggcccccaggcaacaggcggggcccacacccagaagggcaaccgc

SEQ ID NO: 250776 - RNA, 54 nt, Homo sapiens
acgcgcggaaggcagcgcccagcagcgcagcaagaacggcagaaggggaaaaga

SEQ ID NO: 250777 - RNA, 72 nt, Homo sapiens
gagcgcaccacaaccagcggacacggccgccgggccgcgcccacgggcagcgaggagaaacaggcgccaaac

SEQ ID NO: 250778 - RNA, 73 nt, Homo sapiens
aagaccgaaaacacggagaaggagaggagcacggcagccaggaggccgacccgacccggaccgcccgccggcc

SEQ ID NO: 250779 - RNA, 69 nt, Homo sapiens
gagcaaggaagaaagcagcccagaccacaccaaagaagggggccaccaagcaagcgagaagaagacagg

SEQ ID NO: 250780 - RNA, 53 nt, Homo sapiens
aaagagcagacccaccacaccgcaagccaaacagagaagaacgcaaggaggga

SEQ ID NO: 250781 - RNA, 69 nt, Homo sapiens
aagggaagcacagcgacccgagaaagaacagcaacaaaagcgggcaccaaagacaaggaaccggacacc

SEQ ID NO: 250782 - RNA, 82 nt, Homo sapiens
cagcagccagccggcccgaggacaccgacaccagcaggggaggggcgaccccggggcccggccagcacgaccgaggaggggc

SEQ ID NO: 250783 - RNA, 76 nt, Homo sapiens
ccagaggcagccagcagggggaggccgaccgagcagcggcccagggggcccacgggacagaggccggaacaagaga

SEQ ID NO: 250784 - RNA, 70 nt, Homo sapiens
ccagccggcaggaccacagagacgaaggcacaacccacaggagggccagaggacaaagcacggcggaaga

SEQ ID NO: 250785 - RNA, 89 nt, Homo sapiens
acaaggggcggaggaggcagcgaagaagggaacacaagagccgggaccaagaaaggcccagggaccaaagcccggacaaggcccgagca

SEQ ID NO: 250786 - RNA, 48 nt, Homo sapiens
gacagaccaacgggacaagaaggagaccgaggggagacagcagcacca

SEQ ID NO: 250787 - RNA, 67 nt, Homo sapiens
gaaaggccaaagcccagccccaggcacagaccccagcgagcccagaggaccgcaacaccaggacaga

SEQ ID NO: 250788 - RNA, 69 nt, Homo sapiens
cccgagaggcgcccgccccgagagcaaggaaaaaagcggcaccaagccaaggagggacgaacgacccac

SEQ ID NO: 250789 - RNA, 71 nt, Homo sapiens
cgcggacgaccggagacccgccacaccagacgaaacgccaagagagaaacgaggcacaagcacccacgcca

SEQ ID NO: 250790 - RNA, 89 nt, Homo sapiens
gggcggggcccagaccgccccccggcaccgagagccgagccggcgaaccgaacgaaagaggacccgggagaagaacaggacacagcggc

SEQ ID NO: 250791 - RNA, 82 nt, Homo sapiens
cagcacccaagggggcaagggcggagaaacaagaacagcaagccagggcgagcaggaagaagaacaagaacacacaagaaaa

SEQ ID NO: 250792 - RNA, 69 nt, Homo sapiens
gcaccaaaaagaaccgcagacaggcaaggacacgaccagggggagaccaaaaaggggcagaccggagga

SEQ ID NO: 250793 - RNA, 58 nt, Homo sapiens
aaggaggcgacaagcaacaacaacaagcgcagggacgcaccaaaacggacagccgaag

SEQ ID NO: 250794 - RNA, 72 nt, Homo sapiens
cagcggcgaggacaacacagccacgagcggcacaggacagaaccgcaaacaacggagccagaaacggcaacg

SEQ ID NO: 250795 - RNA, 55 nt, Homo sapiens
gcggggagccccgcgccacaggacaacgccgagacaagagagggcagagggcaaa

SEQ ID NO: 250796 - RNA, 84 nt, Homo sapiens
cggagacaggccaacacgcgggcagcgaacaagcgggagcaaggagggcgaagagcgaggagaaaacaaggcaagcagagaaga

SEQ ID NO: 250797 - RNA, 81 nt, Homo sapiens
gccggacaagcggaccccggcccaggcggcccgagaaaagcaggagaagcggggcagccaaagcaggcacaggcaagggga

SEQ ID NO: 250798 - RNA, 79 nt, Homo sapiens
cacaccccgaacaccacgcgccacgggccaggaacccgcccagcgcgcccagacccggggacgagacccagcagcagaa

SEQ ID NO: 250799 - RNA, 69 nt, Homo sapiens
aggacccacccagaacaggaaagaggaggaccgggggaaagcaaaaaaaccaccccaaggagcagacag

SEQ ID NO: 250800 - RNA, 80 nt, Homo sapiens
cagaaacacagaacgagcccaggcaccgaagccaaagcacgccagccggagaagggaaggagcgggggaaagcgcagaca

SEQ ID NO: 250801 - RNA, 84 nt, Homo sapiens
gggagacagaagcggagaccgccaaagagacagggagcccccaaaggaagagaggaggagaggaaggacaggaaccgacacaga

SEQ ID NO: 250802 - RNA, 75 nt, Homo sapiens
acaaagccccccacagaaaaacgacagagggagagagagacaggagaagacaaggaaggggacacagcaccagga

SEQ ID NO: 250803 - RNA, 76 nt, Homo sapiens
acgccgagcgcaccgacacgccgccaaagccaagcgaaagacagaggcccagccgaaagaggggaggcacgacgac

SEQ ID NO: 250804 - RNA, 62 nt, Homo sapiens
gaaaaacaccaacaggcacagagggcagggaggggagcgaagagccaagaggaccgagacaa

SEQ ID NO: 250805 - RNA, 84 nt, Homo sapiens
ccagggagcgcaggggaggcagaagcagacaggcgagggggcgagcagagaccggaaggcgaaggcaggacaagggggagccgg

SEQ ID NO: 250806 - RNA, 82 nt, Homo sapiens
gcgaaccaaagcgaccagagccaaggccccaggcgcgaacccagaggcagcgggagggacaggagaacaggcacgaccccac

SEQ ID NO: 250807 - RNA, 64 nt, Homo sapiens
gccgcgggccggcgcccagcgcccagggcccaggccgagcagagagacccgggccagaggccag

SEQ ID NO: 250808 - RNA, 95 nt, Homo sapiens
gccacggggagacaaggcaaaaaagcaaaacgaagagcccaaggaacagcccccacagagagcacacaaacaaagcgaaaccacggaagaaaagg

SEQ ID NO: 250809 - RNA, 50 nt, Homo sapiens
cggagcggagacgaccgaggcggcaccaggacgccgaaaagcgaccggac

SEQ ID NO: 250810 - RNA, 83 nt, Homo sapiens
cgccggccggggacccgccggcgccggggcgggaggagacgagaggcagcgaaagcaggcgcgcagagaaggggcaagccaag

SEQ ID NO: 250811 - RNA, 90 nt, Homo sapiens
ccaggagagcgcgccggcgagaagcggccgagccagcagcagaccgcgaccgcacaagcagccgccagcggaaccaagcggcgcggcaca

SEQ ID NO: 250812 - RNA, 77 nt, Homo sapiens
caccacccaccggacagagagccagaaacgaacgccggggaggcagaaggggccgggagcggcccggcccggcacgg

SEQ ID NO: 250813 - RNA, 77 nt, Homo sapiens
acccccaagcgaccaaggaggagccgccagaacgcggaagcgaggcaaaagcaacaaccagcaaggagaggcaacca

SEQ ID NO: 250814 - RNA, 81 nt, Homo sapiens
gaaagagaagggaagcaagaacgcgggaggagacaagcaggcccgccaccaaaaggccagccaaggaccagacaaagaggg

SEQ ID NO: 250815 - RNA, 81 nt, Homo sapiens
ccaccgagccacccgaaggcagacagagacaccaaagacagccaagccacacacgcgagcacccagagggccggcccagaa

SEQ ID NO: 250816 - RNA, 74 nt, Homo sapiens
aaagaaccagacagcagagagagagcggaacgggagaaagcacgggaggagagagccccggggcggaaagaagc

SEQ ID NO: 250817 - RNA, 80 nt, Homo sapiens
cacgagagaccccacccaaggaagaccccaagcaaggaacggcaagggacagagcgaagaaccccccaagaagacgaaac

SEQ ID NO: 250818 - RNA, 81 nt, Homo sapiens
cgcgacagagacagccgacgaaaaggaagagagacaagccagaagagcaaccagagaccaggcaagaacacgccagggaac

SEQ ID NO: 250819 - RNA, 74 nt, Homo sapiens
ccgggcaaaagaaagcgggacagcaacagccaagaacgagccaacgccccagcagcagagcagcgagccgaggg

SEQ ID NO: 250820 - RNA, 70 nt, Homo sapiens
gaaggcacaccgaaacacgcaccggaaaagagaaaaccagcaagccaaacgggccaaaaaacaggcgaac

SEQ ID NO: 250821 - RNA, 71 nt, Homo sapiens
ccagggacaagagggaaaggagagggacagagaagaggaagagagagagggcccaaaccaccagaaccgaa

SEQ ID NO: 250822 - RNA, 66 nt, Homo sapiens
cggcccgaaagaagagcccaacagaagcaagaagagagaacccaacaggacaggccgccgcgaccc

SEQ ID NO: 250823 - RNA, 69 nt, Homo sapiens
caaagcgaacgaagagcaccgggagcggcgaagaggcaccggaggaggaacagagacagacccgggggc

SEQ ID NO: 250824 - RNA, 87 nt, Homo sapiens
gggagccaagcggagagccaggacacaacaccgcggagcccgcaggcgggacgaacagcggggacgccccagcagaccgcccaggag

SEQ ID NO: 250825 - RNA, 83 nt, Homo sapiens
aaagacagcgccgggagccaaccggcgcccacaaggagggaaagaacggaagccacagaaacgaccgcaccgaaacccgggga

SEQ ID NO: 250826 - RNA, 73 nt, Homo sapiens
ccagagcgcgaggggcacccagcagcgaagagcaaaggacccaccacgagaaacaagaggcagcacaggggaa

SEQ ID NO: 250827 - RNA, 85 nt, Homo sapiens
aaacagaaaaagcacaacagagggacaacaaaagccccacaagagccaccaaaagggacccccaaaagacaagggcaaaacggac

SEQ ID NO: 250828 - RNA, 80 nt, Homo sapiens
gcgcagaggggcaggagccgggagccaccgcgaagcggcgcgaccacaagcgagcaggaagcagcagcgcaggcccagga

SEQ ID NO: 250829 - RNA, 74 nt, Homo sapiens
caaccccgggcggccgcaccgccaggggaggcaccacgagggcagggcaggcagaagaagggggaccaggagcg

SEQ ID NO: 250830 - RNA, 76 nt, Homo sapiens
accaggcacgagaggcgggggagggcagggaggacgagcacagggacagccgaaaagccgacaggcagcggagagc

SEQ ID NO: 250831 - RNA, 79 nt, Homo sapiens
gccagaggggagacacgccaaagccccaagacacgagagggcgaagggcgccaacgcggaaaaacaagggcaacacccc

SEQ ID NO: 250832 - RNA, 95 nt, Homo sapiens
gccgagagggagggaccaggcggagcagcagcagccagaaagccaggccacgagagcagcccgccccccggagaaagcgggcgggagacagaccc

SEQ ID NO: 250833 - RNA, 80 nt, Homo sapiens
ggagcggaggagggcacccacgggggccggagaacaagcgcaggaggaaagagagcccagagaaaaaaaaagaaaggacc

SEQ ID NO: 250834 - RNA, 81 nt, Homo sapiens
ccgaccgagagaaccagcgccagaaacggcgaggaaagagaggagccccggaaagaaaaggacagacccggccagaaagga

SEQ ID NO: 250835 - RNA, 71 nt, Homo sapiens
gggacaaaccaacagaagggcaaccagggaacggcagaagaaggggaaaagaaagcccgcgacgcaggaaa

SEQ ID NO: 250836 - RNA, 75 nt, Homo sapiens
aagacacacaacccaacagagcgcgaggagggaaacgcgagggcaccaggaccagccgcccggagaagacagggg

SEQ ID NO: 250837 - RNA, 59 nt, Homo sapiens
cggcccaacggaggacaagggggcgggcccagggcaccgaagccccacacgcggcccca

SEQ ID NO: 250838 - RNA, 76 nt, Homo sapiens
gacgccgcgcggggacgcaaggccggcagcgcgacagccacccgggggagggcagaaaccacccagccagagcggc

SEQ ID NO: 250839 - RNA, 78 nt, Homo sapiens
gggaagcgcccgcgccggggacgggagcccccccccccgcagagcccccgcgcggggacgacacggggcacaggcaga

SEQ ID NO: 250840 - RNA, 53 nt, Homo sapiens
gcggaaggcagcgcccagcagcgcagcaccaggaagaagaggcggaagaaaca

SEQ ID NO: 250841 - RNA, 66 nt, Homo sapiens
cagagccgggccagcccagagacaggagaggcacaacccaccggccgacccccagggcacaacggg

SEQ ID NO: 250842 - RNA, 74 nt, Homo sapiens
gcacaggaacagggccgccccaagggcccaggacagaaggcgggcaaggagcgccccccgagcaccccccacag

SEQ ID NO: 250843 - RNA, 83 nt, Homo sapiens
aaagcagacaagccagcggagaaagccaggagggggccacaccgaacccagccgggaggccaaggccagggagcgagcccagg

SEQ ID NO: 250844 - RNA, 82 nt, Homo sapiens
aaggaacaagcgcaggacaaaaacgggcagaaacggaaacagagagcgcaaggagcagccgaacaagcgcacggaggaaaca

SEQ ID NO: 250845 - RNA, 71 nt, Homo sapiens
aaaagaaaacgacccaacagcaaaggacccccacccacccgagaacagaagcaaaaccaccacggacccac

SEQ ID NO: 250846 - RNA, 88 nt, Homo sapiens
cgggacgcaccgcgaccagggccgcaggaagacgcagaggagcgagggaccaaagcgaagaagaaagagaccccaccaacaagaaaca

SEQ ID NO: 250847 - RNA, 58 nt, Homo sapiens
gagcgcaccacaaagcgcgcaacgccaacccaggcgagagggcggagaacggaaaagc

SEQ ID NO: 250848 - RNA, 72 nt, Homo sapiens
gcagcgagaagaaaaagaagagagagacacggacaaggagaagaggggagccggcagcaggagggaaccgcc

SEQ ID NO: 250849 - RNA, 73 nt, Homo sapiens
gcggagggaggagggagccgggaggccagacaacggcaagcggagaagagcaaggccgaaccgagaggaaggg

SEQ ID NO: 250850 - RNA, 73 nt, Homo sapiens
agaagaggagagagagcaagagaggaagaagaacgacccgcccggggcagcagggcagagaacaagcggcccc

SEQ ID NO: 250851 - RNA, 84 nt, Homo sapiens
cgcggccggagccgcgaagcgagagggcgggcgcggcggcggccacgcaggaagaaaacacgaagaaacgcaggagcccaccgc

SEQ ID NO: 250852 - RNA, 67 nt, Homo sapiens
accagaggaagacaggcgccaccgcggagaaaagggcacaacacagaagaaggcggggcaaaggaaa

SEQ ID NO: 250853 - RNA, 73 nt, Homo sapiens
ggcccaaaaacgacaccacgaaggacaagaccaaaacccacggacagggcagaccgccagcagcacagcaagc

SEQ ID NO: 250854 - RNA, 73 nt, Homo sapiens
ccgcgaaggaagggacaaccggaagcaaaaccgagagggcggaagagcgcgggaggggaggccaccaagaaga

SEQ ID NO: 250855 - RNA, 83 nt, Homo sapiens
aaaacaacgccgcaggagcggaggacaccccggagaggacgggaggacggcagcacagggaaccacagaacaggaacacagga

SEQ ID NO: 250856 - RNA, 57 nt, Homo sapiens
aacagcacgcccccaagaagaaggccaagagaggccaacagaggaacaaggcccgca

SEQ ID NO: 250857 - RNA, 81 nt, Homo sapiens
gggaagcgggccggcagcgcccggacgaggaggggagccgccaggcaccagagaacaaaccggagcgggagacgggacaga

SEQ ID NO: 250858 - RNA, 76 nt, Homo sapiens
aggcagccagcagggggaggaggcacaagccccaaagggacggcaagcaacagcaacccagcgggcccgcccaccc

SEQ ID NO: 250859 - RNA, 74 nt, Homo sapiens
ggaccacggggagccccacgagcgggacggccgcacaagcgcagagcaagagagccaggaagcgagggaccagc

SEQ ID NO: 250860 - RNA, 70 nt, Homo sapiens
gaaggaccaagaaccagcacccgaaagagaacaaagaacgaagggaagcgcagaaaggaaaacaaaggag

SEQ ID NO: 250861 - RNA, 97 nt, Homo sapiens
gggaagagaacaacggcggcaaagccgagaaggagaacaccccgagcgaggccaacccaggaggaggaggcaaaccgccaaaagcccgaggaccaga

SEQ ID NO: 250862 - RNA, 113 nt, Homo sapiens
gcagcaaacagccagaacagcagcccggcagcaggccggcgagggggcaggcagggagccgagcggagccagggccccaggggaccgacccaaagcgaggcaagcgggcccag

SEQ ID NO: 250863 - RNA, 65 nt, Homo sapiens
gcggcgccagaaaagcgaggaccgggcccgggagagcggagagcagacaagaagccccgccccac

SEQ ID NO: 250864 - RNA, 85 nt, Homo sapiens
ggagaggggagcgacccggggaccgaccggggaccccgccgaagagggcagcagcccagcgccccacggacccccccgggccagg

SEQ ID NO: 250865 - RNA, 53 nt, Homo sapiens
aaaaccgcccacgcagcagggcgcgaaaggggcggagaacaagagagaaacgg

SEQ ID NO: 250866 - RNA, 77 nt, Homo sapiens
ggacggagaaagccgccgcaaaaaaaccacccccagagaggggcggaaaacaaaaggggggggccagccgaacccag

SEQ ID NO: 250867 - RNA, 71 nt, Homo sapiens
aaccgaggccagaaaggacacacagcaacgaagcaggggaggagggaagaccggacagcgagccaagagag

SEQ ID NO: 250868 - RNA, 78 nt, Homo sapiens
cagaacggcagcccggaagaaaagaacgcgacaccggcaagcgcgagagggaaagggccccaagagccgggcggaaaa

SEQ ID NO: 250869 - RNA, 83 nt, Homo sapiens
gccggacccagcaccggcccggcccgcgaacgcgagcacgcgcggaaacccaaagggcggagaacggaaaagcaccaggaagc

SEQ ID NO: 250870 - RNA, 77 nt, Homo sapiens
cggcggcggagagaagcgccaaaggaccggacccagagaagaggaaaaccaccgggcagcaaagaaagggagacagg

SEQ ID NO: 250871 - RNA, 79 nt, Homo sapiens
cgcagcacaccccacaccagaacccagcagcgccagcacggcagagaaaaaccgccgcgcagggaccacgggagaaaaa

SEQ ID NO: 250872 - RNA, 64 nt, Homo sapiens
cggaccacgggaccaagcagacaaaccaagccagagaaaaccgcggaccccgagacggccggga

SEQ ID NO: 250873 - RNA, 70 nt, Homo sapiens
ccgacgggaggagggccaaccaacaggaaacgaaagcacaagccgaaccgaccgcaaaacgggacaagcc

SEQ ID NO: 250874 - RNA, 58 nt, Homo sapiens
gaaaagcccgcagagaagccaaggcgccggaagacaaagaacgggcagaaacggccgg

SEQ ID NO: 250875 - RNA, 71 nt, Homo sapiens
caccacagagcgcccacacaaaaggaacaagcagaaagcacgaacaacgagaacaagacacgagcaaaccc

SEQ ID NO: 250876 - RNA, 83 nt, Homo sapiens
gccccccagccgccgaagaccgcccgcccggggacagccggaaacagcgggggggcccaagaccaacacgcccacccacaaga

SEQ ID NO: 250877 - RNA, 79 nt, Homo sapiens
aaccaagcccggaaacacagggaagaaaggaacgaggccagcaccacgcacagggacaaaggcaaggagaagcagcggc

SEQ ID NO: 250878 - RNA, 77 nt, Homo sapiens
ggcacgggcaagccgggccgcgcgcgagacacgagacgacgcccaaggggcaagaaggacacccagaaaagaacaca

SEQ ID NO: 250879 - RNA, 73 nt, Homo sapiens
agacgaaggagagcgaagcaagggaccgaagaagccaaaggaggaaaccgacaagcccaaacggaagaagagg

SEQ ID NO: 250880 - RNA, 86 nt, Homo sapiens
aaccaaagggaggcgggaagcagcagcagggagacgggcccgggacacccagacagagagagcgcacgaagaagggcggaggacaa

SEQ ID NO: 250881 - RNA, 79 nt, Homo sapiens
cgaagaaggaggcaggcacgggagccgaagaggacggaaggcccacgccccgaagacaaaggaagcgccagcgccgggc

SEQ ID NO: 250882 - RNA, 71 nt, Homo sapiens
accaacccgaagaaagagagggaagaagcagggcagaggaccaggacgcggagaacgagaaggcggagcgg

SEQ ID NO: 250883 - RNA, 80 nt, Homo sapiens
aaaacaccacccaacccaagaaggccccccaacacccccaaagggacagaggcagagaagcacgaacacacaaacggcac

SEQ ID NO: 250884 - RNA, 77 nt, Homo sapiens
acccaggaaaccccagccagagcgaggcgaaacgaggccagcgagaaagcccaaggagacaggcaagaggggaaaca

SEQ ID NO: 250885 - RNA, 81 nt, Homo sapiens
gacggcccagcgagcaaaaaaagccccacgacggcaggcgcacggaacagcgaggccagcaggagacggagccacggagca

SEQ ID NO: 250886 - RNA, 71 nt, Homo sapiens
acccgcggggacagggaaaaaacacacaggccacccagcgagaaaaagagccccaccgaaaacagaacaag

SEQ ID NO: 250887 - RNA, 51 nt, Homo sapiens
ggcgccagaaggcaagacgcagaggggcaaaggggacggaaacaagcagca

SEQ ID NO: 250888 - RNA, 79 nt, Homo sapiens
gcggcggcggcggggacggcggcagcggagggggccgggaagagggcgacaaggaagagcagcaggaaaggcggcgcgg

SEQ ID NO: 250889 - RNA, 87 nt, Homo sapiens
ggacaggaagagaggccccccaaagcaccgcgcagcgacagggagcacgaggccaggaggagagcccgaagcgccgcaaccggggcg

SEQ ID NO: 250890 - RNA, 59 nt, Homo sapiens
gcggacgccggccgccgcaggaggaaggggcaggaccagcgcccggcaggcgccacgcg

SEQ ID NO: 250891 - RNA, 71 nt, Homo sapiens
aaagagcagccaaggcagcagaagagggaaacaggccagccacgcagcagcagaagccaggccgggcgggg

SEQ ID NO: 250892 - RNA, 58 nt, Homo sapiens
cgcggaaggcagcgcccagcagcgcagacagaccaggaccgccgggcaggacacgccc

SEQ ID NO: 250893 - RNA, 50 nt, Homo sapiens
gcgcagcggggacgcggacgcacggaaaacacacgagcgccagaaacacg

SEQ ID NO: 250894 - RNA, 72 nt, Homo sapiens
cgcagcgggaccaaaccccccgaccgggaagcgaagagccggcgagagccgagagccaaggcggacaaagca

SEQ ID NO: 250895 - RNA, 76 nt, Homo sapiens
ggaggccgaggcaagaggagaagcgagagcgaggaggagagaagagaggaagcgagcagcacgggcaagcgggcag

SEQ ID NO: 250896 - RNA, 137 nt, Homo sapiens
ccgaagcggcggcggccgaggacggggacagcgacgacgcggaggcagagaagggaacgcccggcccagccccgaagccaaagcagaaccaagacaaacgaccccggaacacggaggcaaggggcaccaagccagcc

SEQ ID NO: 250897 - RNA, 77 nt, Homo sapiens
acacgacaggaggcagaaagccagaaaccaaggagccaaccgggaaaagggggacagggcgagcaggacaccaccgg

SEQ ID NO: 250898 - RNA, 76 nt, Homo sapiens
aaggagagcgaacgcacgcaaagacaaggaaaccaggccagcacgaacaagcaaaagccgggaacggccaaaccag

SEQ ID NO: 250899 - RNA, 67 nt, Homo sapiens
gcccggggggagggagcgggagcacacagccggggccacacggcgggaaggccacccgaaggcgcgc

SEQ ID NO: 250900 - RNA, 73 nt, Homo sapiens
cagcaccccccaccaaagccaccagaagcaacgaaaggccggccgaccacgaccacacgaaaccgggagaaga

SEQ ID NO: 250901 - RNA, 72 nt, Homo sapiens
cgaaccccggcccaagagacccgcccaaacgccgcagaaggcgggaacaggagaacaaccgcaacgaacaaa

SEQ ID NO: 250902 - RNA, 80 nt, Homo sapiens
ccgccgccgaccgccgcccgccacacccgccgccaggaaggcggccccgcagcagaggcgagccgccaggggaagggggc

SEQ ID NO: 250903 - RNA, 101 nt, Homo sapiens
ggcggcggccggaaggcggcaagcccggcagcgggaacacagagagcgaagccagaccaccggcccaggcggaggcagggcacaacacagcgaccgcaacc

SEQ ID NO: 250904 - RNA, 104 nt, Homo sapiens
caccagcccagcccacggccaccaccagaagagcgcgacggagaccccagaccagaaagacggaccagcaggcgaggccaggccacccagcgaagagagacgcg

SEQ ID NO: 250905 - RNA, 78 nt, Homo sapiens
cgacaggggggccggccgcgcagccggacccaaagacaggaccacgcaccagcagagaaggaaagcaaaccgaagcag

SEQ ID NO: 250906 - RNA, 81 nt, Homo sapiens
ggagagccaagccacgaccggcggggcgcgccaaggacacggcacaccgaccgacgagaaggagggggcagagcacggcag

SEQ ID NO: 250907 - RNA, 85 nt, Homo sapiens
accacagaagacacgggcgggcgacggggcacaaacaccggcccgggcgagcagagacgcgagcagggccagccggagcagggcg

SEQ ID NO: 250908 - RNA, 83 nt, Homo sapiens
agacccggcgcggcgccccgggcccagcacgcggggcaggcggcagaaggaacgagggagcacggagggaaaagaagccgccg

SEQ ID NO: 250909 - RNA, 94 nt, Homo sapiens
cagaccgaaacgaaggagacgaggcccagaagaacaaaggggacgggcagagaaacgaacggggcgcgaaagacacggacaacgcaaacccggc

SEQ ID NO: 250910 - RNA, 54 nt, Homo sapiens
gccggcaaccccgagcccgcccacgcaggcagcgagggaaacccagacgacaag

SEQ ID NO: 250911 - RNA, 57 nt, Homo sapiens
ggccaaaggcaggccagcaagaggccacaagggaaagggcaccaagggcgccacgca

SEQ ID NO: 250912 - RNA, 91 nt, Homo sapiens
gcgccggcgagaagcggccgagccagcagcagcccaccgggggacggcacggcaggcggacgcccggggccccccggaccacgaggagcac

SEQ ID NO: 250913 - RNA, 68 nt, Homo sapiens
cacaagagggcagacggaacgaacagaagacagcgaacgggcacgacggccagcgaaacagagaacaa

SEQ ID NO: 250914 - RNA, 70 nt, Homo sapiens
aaaaaacaggcccagccccgggggacggaagcggcagcgggcagccggcccagcacagggagcagaaccc

SEQ ID NO: 250915 - RNA, 67 nt, Homo sapiens
ggaacaagacaacagacgccacagccgacagggaggcccccggaccgaaagaaaaccgccaggccgc

SEQ ID NO: 250916 - RNA, 73 nt, Homo sapiens
agggcaccagacagcgacgagaagacagcaggcaaaaggacaagagaccacaaaaggaaaaaaagagaaaggg

SEQ ID NO: 250917 - RNA, 84 nt, Homo sapiens
caagaaccaaccaccccagcaacaaggcaagagcgacccgcagaaggcggggaccagccgcgccagcaacccccagccacaacg

SEQ ID NO: 250918 - RNA, 78 nt, Homo sapiens
gagcacgagcaacacagcacggcagcccacacaagaagcacccgcgcaggccgcaccacgcgggaagcacaggagagc

SEQ ID NO: 250919 - RNA, 78 nt, Homo sapiens
gcccggggccgggggcccgcccggggcggcaaggaccgagcagccccgccacccggacgagggggaccaagaaggaac

SEQ ID NO: 250920 - RNA, 84 nt, Homo sapiens
cagcgcccggaccggccgagaggaagacgagccgggaggaacggcccggaaacaggaggacgcgggacaagggcgcaccggggc

SEQ ID NO: 250921 - RNA, 69 nt, Homo sapiens
ccagaccaggcgaggcgcagaaggggacagaacagacaggccgccagggggacagaaggagcaggcaaa

SEQ ID NO: 250922 - RNA, 88 nt, Homo sapiens
cgcaacacggccccacggcacaacacacccgcaagggacaccacaccgcccaccgggaacagggcaacacacaagcccaacaacaagg

SEQ ID NO: 250923 - RNA, 72 nt, Homo sapiens
gcggacacggagaggaagggcacaaggcacaaagcaggaggcaggaggccaggaagaggcccagacccagac

SEQ ID NO: 250924 - RNA, 69 nt, Homo sapiens
cgccacacccacggaacagaggggaccacaggcgagaacgagccgcaggcaccaagaagaccaacaagc

SEQ ID NO: 250925 - RNA, 74 nt, Homo sapiens
acagcacagagggacagaaaagaacgcaaaggccaacacggagaaacagggcgacaagaacagagaagaaggcg

SEQ ID NO: 250926 - RNA, 74 nt, Homo sapiens
ccaccaccgcaggcagcccaggaaaaaggcgcaggcacacaggacggcccacccccacgacagggaaagaggac

SEQ ID NO: 250927 - RNA, 76 nt, Homo sapiens
accaggacagggggcaccacaacccaccccaaggcaaaagcagaccggaaaacccaccggcaagaccacacccgag

SEQ ID NO: 250928 - RNA, 77 nt, Homo sapiens
gaaaaagaagccggccggacaggagggcaccgccgaccgaaaccgcaaacacacgacagaggcaaggcaaacacgaa

SEQ ID NO: 250929 - RNA, 61 nt, Homo sapiens
ccggccccggcccacaggggggggcaaacccgagagaacgggcaccggacgaagaaagaac

SEQ ID NO: 250930 - RNA, 33 nt, Homo sapiens
ccgcgaaacaaaaacacccgcagccgcacagcc

SEQ ID NO: 250931 - RNA, 58 nt, Homo sapiens
gacccaacaaagcacacagggacgaggagcacaaccagacagggccaccgcaggggag

SEQ ID NO: 250932 - RNA, 78 nt, Homo sapiens
aaaacgaaaaggaacggggaaagaacggagaacgggcagcgacacagcgggaccccgggggcaggaaaacacagaaga

SEQ ID NO: 250933 - RNA, 78 nt, Homo sapiens
gacgggccgccgggacccggacgaccaacgggagccgcaaggacaacagccgcggccagacagcggccggaggagaac

SEQ ID NO: 250934 - RNA, 81 nt, Homo sapiens
gcggcggcgagcgcggcgagacgccagccacccgacacgccaggaaaaccacgagagggcgacccacagagacagcaggac

SEQ ID NO: 250935 - RNA, 71 nt, Homo sapiens
aggacacccggaagccggaaagcgagacgacgggaccgaaggaccccgccagagacaaccgagcgccagga

SEQ ID NO: 250936 - RNA, 76 nt, Homo sapiens
acaaaaagcagcccggaggggaagagaccgcaagcagagcgacaagcaacgcaaaaacaggcggggcgcgcgcggg

SEQ ID NO: 250937 - RNA, 74 nt, Homo sapiens
caagacacggggcgacgccacagagaaaggacacgcgaagaggaagaaacgagaacggcaaaaggaagacgaca

SEQ ID NO: 250938 - RNA, 81 nt, Homo sapiens
gggggccaccgccagcggcaggccagagagccccgacgccgcaggaacaggcagaggagacaccgcgccacaaagacgccc

SEQ ID NO: 250939 - RNA, 64 nt, Homo sapiens
gccgacccgagccggcgcgggccgccgcacgaggaacagagccccgacccgccggacccacaca

SEQ ID NO: 250940 - RNA, 78 nt, Homo sapiens
agagacgaacgaggaagaaaaacagcagaaaagcagacagagaagcaacagaaggcgaggaaagcagaacccggcagg

SEQ ID NO: 250941 - RNA, 81 nt, Homo sapiens
cgagaagcgccacacgggaaggggaaaaagggcgagacccagaaggaacggcgcaccacccgaagacacgcacccacaagg

SEQ ID NO: 250942 - RNA, 40 nt, Homo sapiens
ggggggcaaacccgagagaacggaggacaaaagcagcccc

SEQ ID NO: 250943 - RNA, 64 nt, Homo sapiens
aaccccgcgagggcgaagcagcaggacaccagacgcaaaaaggcaaggggagagccaggcgcag

SEQ ID NO: 250944 - RNA, 71 nt, Homo sapiens
gaacagaagagaggaagaaaggacagggagagaagccaagaaagacagggccagacagccaccgaaggggc

SEQ ID NO: 250945 - RNA, 57 nt, Homo sapiens
agccgaaagaggcacgccagggagaagagccaaggagaccaaacccagcagcaccgc

SEQ ID NO: 250946 - RNA, 71 nt, Homo sapiens
cggaccagaccgaccaccaaaaaacacgaagcaaaggggaacaaaagagaagaaggaaaaggaaaacacaa

SEQ ID NO: 250947 - RNA, 71 nt, Homo sapiens
agcgaggggccggagagggccggaccgagcggccggacagaggaggaagagcaccagagcccggaagaacc

SEQ ID NO: 250948 - RNA, 91 nt, Homo sapiens
aagcacgggcccgggcgccgcggaccagcagcgcgggagagcggaccccccgccaccgcccgagcccagccccacagccaggaccgcagcc

SEQ ID NO: 250949 - RNA, 73 nt, Homo sapiens
caacagacaagacaagcggagcaggaggcaggaagcacgaccacggcacacagaaagggccacagaaccaccg

SEQ ID NO: 250950 - RNA, 86 nt, Homo sapiens
ggcccagcacccgccgccaggcgccgggggccgaacggcccggacacccgcaggcgcagcccagcccgaaagcagaacgacgccgg

SEQ ID NO: 250951 - RNA, 70 nt, Homo sapiens
gaaccaccaaaggacgaagaaacccgcggaaagaaagccggaaaggaacagaagacacaggcccgggcaa

SEQ ID NO: 250952 - RNA, 71 nt, Homo sapiens
acggcgggaagaagcaaacgaagggcaagaacaaaaagggaaaaagaaaagggcgaagacccgaagcagcg

SEQ ID NO: 250953 - RNA, 76 nt, Homo sapiens
ccccgagaacgggaacagcagaacccaagccagacacgaaacccaaggggcaaaggaaccagcccgaaagcaaagg

SEQ ID NO: 250954 - RNA, 75 nt, Homo sapiens
aggaggacacgcgcagggcccacgacgagacaacaacaagacgaaaaacgcgaagaaaaaaccaaacaggggagg

SEQ ID NO: 250955 - RNA, 36 nt, Homo sapiens
gacggacccagccaaagcgcgaccgcccagggagac

SEQ ID NO: 250956 - RNA, 78 nt, Homo sapiens
cgacacgagaagaagagacacagaggagaggggcggacggacgggggaaagcaaagaacaaaagaagggacaaggggg

SEQ ID NO: 250957 - RNA, 68 nt, Homo sapiens
ggaacagaccaacggacaagggcgcaagcgaaaagaagggagccagcaaacaaacggagacggaggcg

SEQ ID NO: 250958 - RNA, 80 nt, Homo sapiens
cgaagagacgccagaagaacgaggaggagaagggagcccaagagcagaaccccggggaggagggaggagaccgcccaacc

SEQ ID NO: 250959 - RNA, 103 nt, Homo sapiens
ccagcgacccagccacaggaacagagacagcgccgcgggcaaggaaacggcaaaacagagcccagaggccacaggacgaaacagcagacagaagagcagacca

SEQ ID NO: 250960 - RNA, 58 nt, Homo sapiens
agaacagcacgagccccggagggcgaagggaagaagcagaaaccagcccgcccggagc

SEQ ID NO: 250961 - RNA, 67 nt, Homo sapiens
acaaccccacgagaaggccccaggcgggcgcggacggcaggggcgccggggaacccgcgggaagaag

SEQ ID NO: 250962 - RNA, 79 nt, Homo sapiens
cagcaggaaagggacagccccccacacaccaaggacaagcagacagagagccggggaaaagcggcagcggccgcacacc

SEQ ID NO: 250963 - RNA, 71 nt, Homo sapiens
cgagagccgacccaggccgccggccccacaggggggcgaggaagagacaggcgggggagaagaagcagggc

SEQ ID NO: 250964 - RNA, 63 nt, Homo sapiens
ggggcaaagcagagggcaggaggggcacaggaggcaggcaaaaccacaaacggcggaacgacg

SEQ ID NO: 250965 - RNA, 63 nt, Homo sapiens
cccgagggcgggacacaggcccgagggcccggaaaggggagcacagaggcggaacaagaaacg

SEQ ID NO: 250966 - RNA, 77 nt, Homo sapiens
cgagcccgggcacccgcggaccagaggggggagaagggaccaggaagacacgggggcaggcagagaaggcaccaacc

SEQ ID NO: 250967 - RNA, 66 nt, Homo sapiens
cgaccccgcacgggaagggaggaagcgggaccccgggagcaggcccaacgcagccaggcaagaaga

SEQ ID NO: 250968 - RNA, 77 nt, Homo sapiens
aagaggagacacgagggaacaaacaccggagcaccggggagagagacaacaggaaaaaggccgacaacgaaaaacaa

SEQ ID NO: 250969 - RNA, 52 nt, Homo sapiens
gggcccgggacaacgcgacgagcaacccagcgccgaaacacaggcaagggaa

SEQ ID NO: 250970 - RNA, 81 nt, Homo sapiens
cacagccggaccgcacccgcaccgccaaccacgggcgaggaggcgccgcgcagggggggccgcccgcccaaggcaggaaga

SEQ ID NO: 250971 - RNA, 74 nt, Homo sapiens
agaggagccgagaaccgggcaaagacgacgcggagaggagcaaagaggcccaggaccggaccccgacggagaga

SEQ ID NO: 250972 - RNA, 82 nt, Homo sapiens
gagacaggaggcagagccaaacacccagggagagcagaaagacgagccgccggggaaaaagcgcagcaaagagacaagccaa

SEQ ID NO: 250973 - RNA, 78 nt, Homo sapiens
cgagaagaaacagccaacaaaaaggggcaaaggaccgcagaacaaaacggacacaagccggcggagaacggaaggcgg

SEQ ID NO: 250974 - RNA, 86 nt, Homo sapiens
cacggagagccaagacaaaagcaggaaacccagaggagggaaggacaaagcggacacaggaagccgaggcagcgggggccccaggc

SEQ ID NO: 250975 - RNA, 82 nt, Homo sapiens
ggaacccggcagcaggggggggccaggcggccacacacccggagcaccgcacacagcggcaagccaccggaccagccccacc

SEQ ID NO: 250976 - RNA, 64 nt, Homo sapiens
ccaccacagacccagacaggagaaggcaaccaaaggcaggacacaaaaacaaccgaaagaggcg

SEQ ID NO: 250977 - RNA, 78 nt, Homo sapiens
caccagcaaaagccgaacaggaccagccccagcagagaccagagaagccccccaccagccccaacagcaacaacagga

SEQ ID NO: 250978 - RNA, 88 nt, Homo sapiens
gagcggaagacgcgaccaacccaggcacagcggagccggcgcggggccacaaaggcaccaagcagccgaagagaaacaagggacagca

SEQ ID NO: 250979 - RNA, 61 nt, Homo sapiens
gagcaaaacagaaaaaaagccagaggagcacaggccgcccacggaggcagagagcaccccc

SEQ ID NO: 250980 - RNA, 56 nt, Homo sapiens
ccaccggacagcaagaagagagggaacccccagcaagaggcccaccccaaaccagg

SEQ ID NO: 250981 - RNA, 78 nt, Homo sapiens
ggacacccaaacgcagcgaacacaggcaggagaagcccgacagcgcagcggaagccccggggagggaggcacacacag

SEQ ID NO: 250982 - RNA, 74 nt, Homo sapiens
gccccgagagcgggaacagcggcgagaacaggcaccgaaagggggaaaggcagagccagaaaagcaaggagccc

SEQ ID NO: 250983 - RNA, 78 nt, Homo sapiens
cagccagccgcccgcagcgcggggcggcgggagccgcgccagaagcagcgccccgagccccggccccaaagacccaaa

SEQ ID NO: 250984 - RNA, 62 nt, Homo sapiens
caaagacgcgccagcggggggaggcgaacagcagaccaggggcaccccccaccccgggacac

SEQ ID NO: 250985 - RNA, 72 nt, Homo sapiens
ggccgccaacacccccagagaagaaggaccgaccacagaacacaccaagcagccggcacccgcacaacccag

SEQ ID NO: 250986 - RNA, 81 nt, Homo sapiens
cacgcagccgcggcccggagccccggggcggcggacggccgcgggcagaacagcaacccgccaggaccacgcagacccacc

SEQ ID NO: 250987 - RNA, 74 nt, Homo sapiens
gcagcccgccaggcgagcgccgcgacaggcggaagggagaacaagcagaggaaagacacgccagagaagaacag

SEQ ID NO: 250988 - RNA, 69 nt, Homo sapiens
cccgcgacgccaaccacgacgaagcggaaggcagaaggacccagaagaaccacgcgcaggccagagcag

SEQ ID NO: 250989 - RNA, 78 nt, Homo sapiens
ccagcgacacaggaagaacagggcgaggacgaggaaagaaccccaagaacgaaaaggagggcaggagagaaagagcaa

SEQ ID NO: 250990 - RNA, 87 nt, Homo sapiens
gcgggagccgcacgcggcgaaggaagaggagggcaagaagggcaagaaggacagcccagagcaagcacacggaggcccgggagccag

SEQ ID NO: 250991 - RNA, 72 nt, Homo sapiens
caacagagaaacggaaccacaacaaaccaggacccgaagacggcgagggacacaccccaggccgaagccagg

SEQ ID NO: 250992 - RNA, 65 nt, Homo sapiens
gcggggcagcgcgagccgggaaggggaacagcgcaccaggaacccggcaccggcgccgcgccaag

SEQ ID NO: 250993 - RNA, 92 nt, Homo sapiens
cccccacccgcccacggaccgaggaagccccgcagcagcagcccaaaggaaggcagccaccggaagagaaaaccaagaacgacagaggggca

SEQ ID NO: 250994 - RNA, 62 nt, Homo sapiens
gccggacgggcggccccaccagggaaaacaaaggcagagaagccagacggcaaaagcagcgg

SEQ ID NO: 250995 - RNA, 82 nt, Homo sapiens
ggggcgggggccccagccccacagaccagcccagcacagcacgcaccccgcgccgccgccccccaccaaggaagcccaagcc

SEQ ID NO: 250996 - RNA, 71 nt, Homo sapiens
cggggaaacccgggcgccgccaagagccgaaccaaacgcccagcgaggaaaggccgacgccccaccgcggc

SEQ ID NO: 250997 - RNA, 83 nt, Homo sapiens
ccgggagcggagccccgggaacccaagaacaccacccaaacccagaccggagcaagaccgagggcaggaggaagcccacaacc

SEQ ID NO: 250998 - RNA, 88 nt, Homo sapiens
cgcgggggccaggcggagccaggaagccgggagccgagacccgggcagagaacagcagaccacagcagggagcgggcgcaccacagga

SEQ ID NO: 250999 - RNA, 61 nt, Homo sapiens
agagccacccccagcaggacgggggaacggcaggagaacagcaccccccccaccaccacca

SEQ ID NO: 251000 - RNA, 114 nt, Homo sapiens
cgagacaaggggccaaccagccagggccaacaaacaggaacgaacgaccaaggccaccggggagggcacaggcacgaacagacagagaaaccaaacaacagggaacagcgacaa

SEQ ID NO: 251001 - RNA, 84 nt, Homo sapiens
gcggcgggcaggcggcggaggacacccgcgaccagcgcgaaaagcagggccgacgggccggggggagcggacaccggggggaca

SEQ ID NO: 251002 - RNA, 70 nt, Homo sapiens
gagcagccggggcggagcggagcgcaaaagacaacccacgaaaaccacacccagggacccccagaaggaa

SEQ ID NO: 251003 - RNA, 80 nt, Homo sapiens
gccgcgcgggccagcggggaaacggaccaggcgaagcgccccaggaaggaggggaagaccgaggagcagggagcaaccac

SEQ ID NO: 251004 - RNA, 58 nt, Homo sapiens
aaaccgaagcaacccgcaaggccaggacacagaaccgagggcaaaagcagaccggaaa

SEQ ID NO: 251005 - RNA, 77 nt, Homo sapiens
gccaccagcacggaccaggaggcgagcaacaggagaaaaccccagagaaacagagggccgaacagaccgcggagcac

SEQ ID NO: 251006 - RNA, 80 nt, Homo sapiens
cgaaaaagagagaggacgaaaggaaggaggaaaaaaaacgcagcaaaaaggaaaggaccagaaagggcgggaaccagcga

SEQ ID NO: 251007 - RNA, 83 nt, Homo sapiens
acgaggccacggggaaacacagcagaacacaggccgaccgcgggccgcgcacccaccgccaaggacaaaaggagcccagcgca

SEQ ID NO: 251008 - RNA, 61 nt, Homo sapiens
ggcgccggccggcggcgcgcggcgcgagccgcagccggcccgccgcacccaggccacagag

SEQ ID NO: 251009 - RNA, 71 nt, Homo sapiens
ccagagcgcaaggagaaaggagggcaggagaaaggagaaaaagaggcagggagaagaaacggcagagacaa

SEQ ID NO: 251010 - RNA, 78 nt, Homo sapiens
cggaggaagaaggaggaaggaccgaaaacgggcaaggcggcaagagcgagcacaccaggaaccccagaacagacagag

SEQ ID NO: 251011 - RNA, 76 nt, Homo sapiens
gaaaaccgaagggaaggccagcagcgcgcggagaagaacggggagccagaccgggaccccacccgcgccagccgcg

SEQ ID NO: 251012 - RNA, 76 nt, Homo sapiens
cccgcgaccgccgcggcgaagagaaggagccaaaaaggggagaggaagaaagaagagaggaggcagcaggacgaaa

SEQ ID NO: 251013 - RNA, 66 nt, Homo sapiens
agaaacaggcaagagacagggcagaccgccagcagcacagcaagccacagagagggccggcagggc

SEQ ID NO: 251014 - RNA, 70 nt, Homo sapiens
gggccgagaccaaccgacagggagaaccgcagaccagaagcagaaaggggggagcggaagagagacaagg

SEQ ID NO: 251015 - RNA, 74 nt, Homo sapiens
gccgccagagacggcaggcccggccaaagccggacacaagagggcaagaaaggcgcgacgggccgaaaagggac

SEQ ID NO: 251016 - RNA, 74 nt, Homo sapiens
acgaaacggggacaaaacagacaagcacaggaaggaagagagaagggcacagaccaagacaacgaaccccggcc

SEQ ID NO: 251017 - RNA, 85 nt, Homo sapiens
cggaaaccgccaaaaccccccacacaccccgccgggacagaacaaaacgaggaacaaaacagaagagggagaggaaaaagcgaaa

SEQ ID NO: 251018 - RNA, 82 nt, Homo sapiens
gcgccggagccggggccgcgaaaaaggaccacaaaaagaccacagacaacaggcacaaagagagaaggaacacccacagggc

SEQ ID NO: 251019 - RNA, 67 nt, Homo sapiens
ggaaggacccaaaccacaaaccgacaggaaaggcacagagcagaagacgaccgggggaagccaccaa

SEQ ID NO: 251020 - RNA, 88 nt, Homo sapiens
cccgcgccgagccggaggccgcgggacccgaaagccgcgggaaaagggagaaccgccagcgacgggaaggcaggacccacgcacgagc

SEQ ID NO: 251021 - RNA, 69 nt, Homo sapiens
cgagccgcccccacagcgagcaggggaagcgacaggccaggccgccacgaaaacaagaaagaaccccac

SEQ ID NO: 251022 - RNA, 89 nt, Homo sapiens
ccagcccgcccaaagaaagaaggaggagcgggacggagcgggccaccggggccacgacagcgagcgaccccggccgagaccaccccagc

SEQ ID NO: 251023 - RNA, 80 nt, Homo sapiens
gaccccggcccggaggaggccagcgggacaagcgcaccaaggagacagacgagccggcgcagaaaagaaggagcgggcgc

SEQ ID NO: 251024 - RNA, 85 nt, Homo sapiens
ggcggacagcagcccggggcaaccggagccccccaggaggaaaagaaagccgagggaaaaaccggagaagagaaacaaaaggaca

SEQ ID NO: 251025 - RNA, 68 nt, Homo sapiens
agaacaacgccagggcaaacacgcgaggcaacgggacgccgggggaggaagcccaggaacacagacca

SEQ ID NO: 251026 - RNA, 77 nt, Homo sapiens
caccaggaacaaccccacgcggaagaggaagacggagggggcagcaccagaaaaacaccgcccagacaggaaaaaac

SEQ ID NO: 251027 - RNA, 63 nt, Homo sapiens
ccgacccgcaaccaaggacagagccagggacggacagaaagagggcccccagacacccgagca

SEQ ID NO: 251028 - RNA, 66 nt, Homo sapiens
gccaggacaccggaaccgggaaagggccccagggaaaggaccgaggcaggaaagaggccagacgca

SEQ ID NO: 251029 - RNA, 57 nt, Homo sapiens
cgccgcacgacgcgccaacaacgggcacacaagcaaccaccgaaacgggcgaaaaag

SEQ ID NO: 251030 - RNA, 76 nt, Homo sapiens
caaacaacagcagaagcacagacaccccgaaacgccaaaaacaacaggcacaaagagagaaggaacacccacaggg

SEQ ID NO: 251031 - RNA, 79 nt, Homo sapiens
aaggaacagggccaggcgggccgcacaagaagaagaggagaaggggcaagaagggagggagcggcaggcacgggaacag

SEQ ID NO: 251032 - RNA, 83 nt, Homo sapiens
cacagacagcaggagcgaggccgggaccggagcaccggcagacccggggaccgggaaggcggcaaagacgcaacaacagcgag

SEQ ID NO: 251033 - RNA, 82 nt, Homo sapiens
cggaggcggaggcagaggggaggcgcgaaagcccgaaaccgggccgaagacgcacacggagcagaggaaaggagacggggca

SEQ ID NO: 251034 - RNA, 70 nt, Homo sapiens
acaaaagaaggaagcacaggcccagcgagagaaaacaaaggagaaacgaggaaacaggaagaaagaagaa

SEQ ID NO: 251035 - RNA, 80 nt, Homo sapiens
aacagaggaaggaaaggcgcaacaacacaaaaaaagcagcaagggcgcgcggggcggccaggcggcggaggcacggaccg

SEQ ID NO: 251036 - RNA, 74 nt, Homo sapiens
cagcggaggacacaggcaccagacgggacagaaaaccagaggaggcgggaggccgaaggcaccaaccaaaaccg

SEQ ID NO: 251037 - RNA, 80 nt, Homo sapiens
cgaaacccgcaccgaaagggccaagcaacggagaccgggggggcaagcaaccagacgcagggagcccccaggcagaacga

SEQ ID NO: 251038 - RNA, 63 nt, Homo sapiens
gacagccgacgcgcagaagcagagccaccggggaaacacggggaacggccaggccgcgcaggc

SEQ ID NO: 251039 - RNA, 80 nt, Homo sapiens
aggcaagaggcaggaccgacagagagggaaggaaggaacagcagcgcaaaaagagcagcagagacgaggaccccaaggac

SEQ ID NO: 251040 - RNA, 81 nt, Homo sapiens
aagaacgcccgcccccaagaccacccggcgcgggaggaccacaggccacccagaagggccccaccccaaggggagggccaa

SEQ ID NO: 251041 - RNA, 55 nt, Homo sapiens
ccagacaagcccagcaagaccaaacagccaaaccagacaggaaaggcccgagcca

SEQ ID NO: 251042 - RNA, 70 nt, Homo sapiens
acaacaaaacaggcacacaagaaacagggagcgcgaaccaccaagacgccggcccaagagccgcagggag

SEQ ID NO: 251043 - RNA, 67 nt, Homo sapiens
ccaaccagaaaacaaagacaaaaggagacgagaagaagacaagagcggccaagacccccccaggaag

SEQ ID NO: 251044 - RNA, 80 nt, Homo sapiens
ggagacggcaaggaggagccagaggcaacaaggcggacaagagaagccgccagaggaaccaaccagaggcggggccaaag

SEQ ID NO: 251045 - RNA, 70 nt, Homo sapiens
acagcggaagaagacccagggaaacccccagggagaacggcagaaccaagggaccaaagcgggacggcag

SEQ ID NO: 251046 - RNA, 67 nt, Homo sapiens
ggcgggcgcgagcggcccggcgcccggaaagcacgaggccaagggcggggaaggagcgcgagcagaa

SEQ ID NO: 251047 - RNA, 75 nt, Homo sapiens
gagagcgaacgagccgccgaccgagaaacaccgggcgggccccgggcgagcggggggacgcagaagccccgggag

SEQ ID NO: 251048 - RNA, 54 nt, Homo sapiens
cgcgcggcaccccgggcgaggagcgaccagagagcccccaccaagccagcaaga

SEQ ID NO: 251049 - RNA, 64 nt, Homo sapiens
ccaccagaaagaggcacagccccaaaagaaaggcagggagccaacccagccccagagagcacga

SEQ ID NO: 251050 - RNA, 87 nt, Homo sapiens
ccaagccaccccccagaggcagaaacacagcaaggagcacaggaagcagcagaagaagaggaaaaggggagcaggaggcgacaagag

SEQ ID NO: 251051 - RNA, 80 nt, Homo sapiens
cagcagagccaccagccaagaccaagcgcgaaagcgccaaaaggacagcaggcaacgaaggcaaaccgagacccaggcga

SEQ ID NO: 251052 - RNA, 87 nt, Homo sapiens
gcgacgacggggcgcagcgcaggggcgagcggcgggcaagcgcgggccgcggaggaggccagggggccaccacagagcccgcaggga

SEQ ID NO: 251053 - RNA, 69 nt, Homo sapiens
ggccgaccagagaacaggggaagaagcgaccgccgaaaagaaaaaaaacagaaaacgcgagggaccaag

SEQ ID NO: 251054 - RNA, 86 nt, Homo sapiens
cgccacgagccagagggcaagcagggcaagccccgccgaagccccccccccgcagacgggagggacgaagccggaggggggacgac

SEQ ID NO: 251055 - RNA, 69 nt, Homo sapiens
ggacaaaaaacagacggggacaaacagcgcgagaccaggacccgaagaaggcagaacgaaaggccagac

SEQ ID NO: 251056 - RNA, 63 nt, Homo sapiens
ccccgccagcagccgccggagccagccaacgagcgcgaaccggagcagcggcacaaacaccaa

SEQ ID NO: 251057 - RNA, 71 nt, Homo sapiens
cgaccaggaggaacagaccggcggccgacgggacagcggaacaacagaggcagggaagacgaggacaacgg

SEQ ID NO: 251058 - RNA, 74 nt, Homo sapiens
ggggcgagagcgggcaccccccaaacgacgcagccacggagagaacagccagcaaagacaagagcagaccagca

SEQ ID NO: 251059 - RNA, 78 nt, Homo sapiens
cgcaaccggcacaacaggcagagcggccggagcgggacggaaggggacacaggcaagaccacacggacgcacaacagg

SEQ ID NO: 251060 - RNA, 83 nt, Homo sapiens
gaacacccggaagccgagaaagcccgcccgcgcgccagcccaccgcaggccgagcggcccgagggcgaggccgccgccgggcc

SEQ ID NO: 251061 - RNA, 83 nt, Homo sapiens
ggggacaaaagggcgccgcgccccgaagagaagacggaacaagaaaggaccaggagccccgggcaacagacagagggacacca

SEQ ID NO: 251062 - RNA, 77 nt, Homo sapiens
ggacagcgcacacagcaagcacgaggacgccgccggcaaaaaggcaaaaagagcgcgaagagacggagcagaagggg

SEQ ID NO: 251063 - RNA, 81 nt, Homo sapiens
accaacaaaagaaaagaacaaagggccagccagcaaagcagcagaacgaggaacaagacaccagagcgagcccgagaaggg

SEQ ID NO: 251064 - RNA, 59 nt, Homo sapiens
cggagaccccgaaggcgcaaacgacaccacccgaccggccaacggaccacaccaaaagc

SEQ ID NO: 251065 - RNA, 33 nt, Homo sapiens
gagcgcaacaagagcacaggaagggaaggggcg

SEQ ID NO: 251066 - RNA, 55 nt, Homo sapiens
aagccggaggaaaggaaaaaagaaaccacagaggagccccggccccacaagacca

SEQ ID NO: 251067 - RNA, 74 nt, Homo sapiens
ccacgggccaaaggaaaacaccacaagaggacaaccggaaaggagcgccgcagggaaagagagagacgggaagc

SEQ ID NO: 251068 - RNA, 82 nt, Homo sapiens
aaagccggcacgcgcgcgagacaagcagaccggaagaccgacggaagaccacaccccgagggagcccaggacaccacgagaa

SEQ ID NO: 251069 - RNA, 67 nt, Homo sapiens
aaccgacagacaggaagggacggcacgaaccaaaagcgcaaaacgccacccagagcagccgaacgcc

SEQ ID NO: 251070 - RNA, 56 nt, Homo sapiens
cgcagaacagacgcaccaacagcacaagcccgggggaaaggcagcgcgcagcagcg

SEQ ID NO: 251071 - RNA, 83 nt, Homo sapiens
ccagcccacacccaaggagagaagaaaagaaagccgagggaaaaaccggagaagagaaacaaaaggacagagaaaaggcccag

SEQ ID NO: 251072 - RNA, 60 nt, Homo sapiens
agaaggaacgacaaacaggaccgccaaacccaaaccgaaaaaaggcagcggaaagaagaa

SEQ ID NO: 251073 - RNA, 79 nt, Homo sapiens
caagccaccaggagaagcaaaagagagcaggaagacacccacgaggacaaccccacagagcaagagacgaagaagccag

SEQ ID NO: 251074 - RNA, 69 nt, Homo sapiens
gaacggggccccgcaaggccggcgcggaggaggggagcagcgcgcaagcaacacccccagggagcgggg

SEQ ID NO: 251075 - RNA, 80 nt, Homo sapiens
cccgcggcaggaaaggagggaccgggcggggaccggaccccgccccgcaacgcaaggcaaagaaaggcagaagagaggca

SEQ ID NO: 251076 - RNA, 71 nt, Homo sapiens
acagcccagcggcagagcggccaggcccgaaaagagaaaagcccggaaacgcaaaccaagcaaccaacaaa

SEQ ID NO: 251077 - RNA, 65 nt, Homo sapiens
cccgggccaggccgccgccgagccgaggacacccagagcaacaaaccccaaagaacaaagacaag

SEQ ID NO: 251078 - RNA, 98 nt, Homo sapiens
gaggagaacaccaagaagcaaaccccacacgcaggacagaaccaaaaaaaggggcgcccgaagacaacaaacacagcacaccggccacaggcaggcga

SEQ ID NO: 251079 - RNA, 87 nt, Homo sapiens
ccggaccgcgccacaaggagagcccgaagaggaaggagaaggaaagagcagaaaggagcggcggcacggagaagagccacgcagcag

SEQ ID NO: 251080 - RNA, 82 nt, Homo sapiens
aagcccagagcgggagagacggccaagaccagggcggacaacgcaggcccgggagaaccaggaaacggccagaagaacagga

SEQ ID NO: 251081 - RNA, 79 nt, Homo sapiens
gacggcagcaccacacagccaccgcagaaaaaagccgccccacaggggagaaaaagacagcacccaaagcagaaccgga

SEQ ID NO: 251082 - RNA, 75 nt, Homo sapiens
cgaaccaggcagcccaaaagggagccgggggaccggccaggaagaaacaggccggaacgaccccccagggacggc

SEQ ID NO: 251083 - RNA, 59 nt, Homo sapiens
gcgagaacggagcaaggggcaagcaccacagaaggagagaacggggacaaggcaagaca

SEQ ID NO: 251084 - RNA, 33 nt, Homo sapiens
caccaacaccaaaaagcaaagcaccacagggga

SEQ ID NO: 251085 - RNA, 82 nt, Homo sapiens
accaacaccaacacgagggcggcggaaaaagccgccacacgccaaagaggccccgcaaagaagggggcgagaagaaaaaggg

SEQ ID NO: 251086 - RNA, 76 nt, Homo sapiens
gccggacagcaagccacagcaccagcaagagggcagccgccgacccccccacaagacacacaccacgccaagaacc

SEQ ID NO: 251087 - RNA, 70 nt, Homo sapiens
gggaggggaacgaaacaccaagggcaaacagccaaaaaggggcgccaccgagacaacacggaccagcaac

SEQ ID NO: 251088 - RNA, 74 nt, Homo sapiens
ggagaagaacgggacccgcgcaagcggcacaaaggaggaaacagaaacagcgccgcgcgcgcgggaggggggag

SEQ ID NO: 251089 - RNA, 72 nt, Homo sapiens
gaggaaggccgccggcagcaccacaggaggggcaggaaacgaaggagaacacccacacgaggcaccccacag

SEQ ID NO: 251090 - RNA, 57 nt, Homo sapiens
cacgcccaaaagagcgcaccaacccccacggcagaaagaaagcaggaccagggggag

SEQ ID NO: 251091 - RNA, 59 nt, Homo sapiens
cggcgagccgaaaagcgagcgcgaggaaaaggcggcgggagcacgcagcagagagcaaa

SEQ ID NO: 251092 - RNA, 76 nt, Homo sapiens
gaaagaaccgggcacaacccccagcagagggccacccgccccaaggccaccagccagcccaccccagacggggggc

SEQ ID NO: 251093 - RNA, 74 nt, Homo sapiens
ccgcccgccgccgccgccggccgcaggacacgaccagagacgggacggagcagcagggggcccgggcagaggga

SEQ ID NO: 251094 - RNA, 93 nt, Homo sapiens
agacaaggcgaccaaccaacaaccacgggaagccgcggccccaagcaccagcccaccagagaccgggaggcagcaacccagaggccaccgcca

SEQ ID NO: 251095 - RNA, 68 nt, Homo sapiens
cgcccagggccgcgccccccaggcccacaaccagcccagcagcagcaagcagggcacgaaggccgaac

SEQ ID NO: 251096 - RNA, 72 nt, Homo sapiens
cacaaccaaacagaaaaggaggaagaggaagagaggagagccgggggggcaaaccgagggacacccagcgag

SEQ ID NO: 251097 - RNA, 37 nt, Homo sapiens
gacagagagagccaaaccccagcagaccgaaaagggc

SEQ ID NO: 251098 - RNA, 62 nt, Homo sapiens
accgcccccaacaaccaggagacggggcacgcccagagcaggccgccagcccgcggagagga

SEQ ID NO: 251099 - RNA, 62 nt, Homo sapiens
aaagcacaacagagggacaacaaaagccccacaagagccaccaaaacgccggaacccgacgg

SEQ ID NO: 251100 - RNA, 77 nt, Homo sapiens
gaaaggcaacgaccggggcagcacccggacccagcagccaggcagcgccaacgcaaacacagcagggggacacacac

SEQ ID NO: 251101 - RNA, 84 nt, Homo sapiens
cacaaggaaaaggagaagggagcaccagcgcccaggcggagggggaagacagagaagaccacacaaccgaaggggccgggcagg

SEQ ID NO: 251102 - RNA, 60 nt, Homo sapiens
gcgacgccgagcacccaggcgacgcccaccaagcaaggagcagggacaagacaggaagcc

SEQ ID NO: 251103 - RNA, 79 nt, Homo sapiens
gagagagcgagcgagggggggcgcgccggaaaccggagcgcgcagcagaaagcgcaggaaggaaagggacaaagagcga

SEQ ID NO: 251104 - RNA, 79 nt, Homo sapiens
cggccccagagcccacccaacgccccaccgcgcgagcaaggaaccccgggccccgccacccacgcgaccagcccacgcc

SEQ ID NO: 251105 - RNA, 73 nt, Homo sapiens
gaaggaccaagaaccagggggaaacacggagaaaaggagcaccaagaacaagaccaaccaagaaggagaaaaa

SEQ ID NO: 251106 - RNA, 75 nt, Homo sapiens
gccgaagcaaggaccgggacacccagaggaaaacaaagagggaaaacggagaaaagcccccccaggccagcgcag

SEQ ID NO: 251107 - RNA, 73 nt, Homo sapiens
gcagccccgagacacaccggaacggaaaacagccccaaagcagcagaccgaagaaagaagacccgcaacgaca

SEQ ID NO: 251108 - RNA, 52 nt, Homo sapiens
aagagcaagcgggggaccgaacaaggcaaaagggggaaacaacacgaggagg

SEQ ID NO: 251109 - RNA, 83 nt, Homo sapiens
ccaccgagcacaaacccacgaagccaacgcccagacaagccgggccagaccccagcccccaccccgcggagaccccagagccc

SEQ ID NO: 251110 - RNA, 76 nt, Homo sapiens
cggaccaaacgccagcccggcgaccgcgcgggcggaaggagcaggcgggcgacaaaccccgggggaccacccaccg

SEQ ID NO: 251111 - RNA, 78 nt, Homo sapiens
ccggagcagacgcaaccccaagaaccccaaacaccgccacggcaccagcagacaggcgccaggaacggaggggcagcc

SEQ ID NO: 251112 - RNA, 81 nt, Homo sapiens
acaccagaggaaggaacgaagaagaaccaagccgaagcagcagcaacagggcaacgggacggcgcccggaggcgggccgcc

SEQ ID NO: 251113 - RNA, 47 nt, Homo sapiens
gagcagaagaggagccaggaagagagacagcaaagccccacccagac

SEQ ID NO: 251114 - RNA, 77 nt, Homo sapiens
aggagcgccggggccggggcgaacgcggccgagggaagccggagccacagaagaggaccgaagccggaaagaccagc

SEQ ID NO: 251115 - RNA, 84 nt, Homo sapiens
gggccaaggacgacacaagaagggaggcggccacgagaaaggcggaaagacacagaacggccagcagacagcgacgacagagcg

SEQ ID NO: 251116 - RNA, 77 nt, Homo sapiens
agaaaaccagaagcacaaggacagagcacccaccacaggaggcccgggcgggaaggacaccccaaaaccagcggggg

SEQ ID NO: 251117 - RNA, 76 nt, Homo sapiens
ccaccccacagccaggcaggcgaaggggcgccgaaccgagcccgaagggaagggccggcgggccaacacaagaacc

SEQ ID NO: 251118 - RNA, 71 nt, Homo sapiens
gaagccaaggagcgccgggaacaaaaccagcacccaaggcagccggaaacgaggcgcgccagcgcacggac

SEQ ID NO: 251119 - RNA, 81 nt, Homo sapiens
acaccacgacgacgggccacagcagccggcggcggcagaggcaggcggacaccgaccgcaggaaggaggaggaggagggag

SEQ ID NO: 251120 - RNA, 74 nt, Homo sapiens
ggacagggacaagacaaggacaaaaagacgccccagggaacccgagaaggccaacaaaagagcgaggaaccaag

SEQ ID NO: 251121 - RNA, 76 nt, Homo sapiens
aaaccgccgaagacgaagaggaaggggcgagccgccaagagaagcaaaagacaaacccccccccagcacagaaaag

SEQ ID NO: 251122 - RNA, 66 nt, Homo sapiens
acgagagcagcaccaaccaaaacccggcagacaggaaggaaaaaaggaaaaagcgcgcagacggac

SEQ ID NO: 251123 - RNA, 54 nt, Homo sapiens
ggcaagcgacggcccgaacgagcggaggccaacaaaggccgcagaagccaccgg

SEQ ID NO: 251124 - RNA, 46 nt, Homo sapiens
ggcggacagcggggcccgcggaaaacagccacccccacaagaacac

SEQ ID NO: 251125 - RNA, 75 nt, Homo sapiens
ggagccaccaccggcagcgccgagccaaccgcaaagagagcaaacgccgagaaggggagacagaacagcagcaaa

SEQ ID NO: 251126 - RNA, 76 nt, Homo sapiens
gagagaagaggaccggcgggaaccgaccggcgccaccgcccagcacggagccaaaaccaaccaacaacaacgaccg

SEQ ID NO: 251127 - RNA, 68 nt, Homo sapiens
gcccggcccgaaaggagagccggggagagagggaggcgacgccgagacccccgcagcacgagccacca

SEQ ID NO: 251128 - RNA, 61 nt, Homo sapiens
aagagccaaacggagaaggacaggcaggagggaagaaagcagcgaggagccacccgaacga

SEQ ID NO: 251129 - RNA, 87 nt, Homo sapiens
aggccaaccagagggagcaggaagagaggagcaaacccagaccaccacggcaccagaaaccagaagggccggagaagccacgagcag

SEQ ID NO: 251130 - RNA, 74 nt, Homo sapiens
ccggccaccccgcgcgcaaggagcccgggacggagaggccgcaggagcaccgcgcgcgcacacaaggccagcgc

SEQ ID NO: 251131 - RNA, 36 nt, Homo sapiens
aacaacagaggaccccaggcaaagcaaaacacgacc

SEQ ID NO: 251132 - RNA, 69 nt, Homo sapiens
gggaaccgacgcaaaccagagggcaaccccgaaagggacggcgacgggcggaggcagggcgggaccggc

SEQ ID NO: 251133 - RNA, 79 nt, Homo sapiens
aacaccacgccacacaccagcggagccagacagacacagcacagcagccacgaagagcaaagcaagccgaaaaaccgaa

SEQ ID NO: 251134 - RNA, 58 nt, Homo sapiens
gagggagccccaagccggcggccaagacggagccgacacaaccaggccgaagaagagc

SEQ ID NO: 251135 - RNA, 81 nt, Homo sapiens
cagcacggaccaggaggcgagcaacagcccaagacacagccccagcagcccccagacccacagacacacccagggaaaaca

SEQ ID NO: 251136 - RNA, 51 nt, Homo sapiens
ggaccgcgagaaaacacaaaccgaaaggaaagcaagccaagaggggacaag

SEQ ID NO: 251137 - RNA, 74 nt, Homo sapiens
cagagcaaggaggccccagcggaccgaacaggaacggcgcgaagacccggggacagaggccccccccggacacg

SEQ ID NO: 251138 - RNA, 81 nt, Homo sapiens
aacagcacggcgggccccagcccggcggaccgcacaagacggcaaagccgggaggccaccaacgcgcccacaccgaaaccg

SEQ ID NO: 251139 - RNA, 74 nt, Homo sapiens
cgacccccacccagcccgagagcagacacggaggacggaaggcccacgccccgaagacaaaggaagcgccagcg

SEQ ID NO: 251140 - RNA, 81 nt, Homo sapiens
agagcggaacagcagagcgcacaaacagaaaagggccgacaaggagggaaaggggaccagcgacaggcacacgcccagggg

SEQ ID NO: 251141 - RNA, 76 nt, Homo sapiens
ggcccgaccaggcccgggagacaaccccgcgcagcacgggaggagcggggagacgcagcccagcgaaagacaaccg

SEQ ID NO: 251142 - RNA, 60 nt, Homo sapiens
cggcgcccggccaggcggcccagagccggaggagccaccaacagaagcaggagccaggaa

SEQ ID NO: 251143 - RNA, 67 nt, Homo sapiens
gcggggcagcacaccagagaagagaaaaccagccggaaaaacaagagccaaagcggcacgccccagc

SEQ ID NO: 251144 - RNA, 79 nt, Homo sapiens
gcagcaagcacaggcagcgcagagccagagaccacaggagcgagagcaaacaggcaagacagaagacaccagaggagga

SEQ ID NO: 251145 - RNA, 69 nt, Homo sapiens
agcagaccagcgcccaggaagccaaagaaaaaaaaacggagggacccaaccaaggaccgacagccccca

SEQ ID NO: 251146 - RNA, 62 nt, Homo sapiens
ggcagaggccaaggccaaaagccaaagcggaaccaaccgaccaacgaggacaggcgccaaaa

SEQ ID NO: 251147 - RNA, 77 nt, Homo sapiens
ccccgacgggccggccgccgcggcccgcgaggccgagggacaagcagaccggaagaccgacggaagaccacaccccg

SEQ ID NO: 251148 - RNA, 52 nt, Homo sapiens
gaacccagaaagcgcaaaagaaagaggcccacgcggaccggcagcgccaccg

SEQ ID NO: 251149 - RNA, 71 nt, Homo sapiens
ggggaggccccagcgcagcagagcgccaagacggacagcaccagaagcgcgcgcgcacccggccccagagc

SEQ ID NO: 251150 - RNA, 74 nt, Homo sapiens
gcggcgcaccaaccgcgcgcaccgccgacccggaagaccgccgccgaaggaaagcgcaaacccagcaagcgaca

SEQ ID NO: 251151 - RNA, 69 nt, Homo sapiens
gaaggaccaagaaccagaaagcccccacaccggaaaaaacacaagccaggcgacggcggaggggcagac

SEQ ID NO: 251152 - RNA, 67 nt, Homo sapiens
gacaacagcacacaagaacacccagagaccaagccacccaccaacacggggccggcacaacccggag

SEQ ID NO: 251153 - RNA, 102 nt, Homo sapiens
gggaaaacagaagcacagcagcaaaagcaaagacccccggggcgccaccggacagcgagaagaagaaaagaagagagcgaggagcggcaggagcaagccaag

SEQ ID NO: 251154 - RNA, 70 nt, Homo sapiens
ccggacaaccggcccacacgcaagaccaccagcgcgaaagcaaacaaagggaagagccacaaagggaacc

SEQ ID NO: 251155 - RNA, 86 nt, Homo sapiens
cacggggcaggcgcgccccccggggcccaggccgccggcccggacgccggaaccaaaaagaagccccagagccggggccaggagcc

SEQ ID NO: 251156 - RNA, 73 nt, Homo sapiens
gggacagggagaaaaacaagggcacgcaaaaaaaccaagggaaaagagacaagaccgagacacaaaaaaagca

SEQ ID NO: 251157 - RNA, 79 nt, Homo sapiens
gagaccgcgggccacccccgccgcagaacacagggcaaaaaacagagccaaacagcccaagaccacaagagcaaacaga

SEQ ID NO: 251158 - RNA, 72 nt, Homo sapiens
cacggccccagagaaaaacggcagagacagcgccagaaccacggcaaaaggccaacaccacgacgagggcaa

SEQ ID NO: 251159 - RNA, 80 nt, Homo sapiens
aacacaaccagacgcagaaaaccaggaaggggcagagaccgaaggagagcggacaccaacaaggacccaagcggaggcca

SEQ ID NO: 251160 - RNA, 82 nt, Homo sapiens
cgacacgcggccgcggagaccaccgcggcgcggcagcgcgcccgagggaagagaaacggacgggaacaccagcccgagggga

SEQ ID NO: 251161 - RNA, 73 nt, Homo sapiens
gcccaggacagagcaagagcgcacagagccaaagaggacaggaacaagcgccagagggagaagcagagaaccc

SEQ ID NO: 251162 - RNA, 74 nt, Homo sapiens
gacccaggggaaggagagagccccgccgccaacccgcagagacggaggggaggcaagcaggggggcaaaggaaa

SEQ ID NO: 251163 - RNA, 71 nt, Homo sapiens
aaagggcagaaaccgaaaagagaccagggaggagaggcccccagagcagaaaaggggagcggacgggccca

SEQ ID NO: 251164 - RNA, 61 nt, Homo sapiens
gaggagaacgaacaccggaccgccaggaaggcggaaccgagaagggggcccacaggaggag

SEQ ID NO: 251165 - RNA, 78 nt, Homo sapiens
ggaggagacggccgccaggggcgaaggacacagggcagcagggccaccggaaaggaggaggaggcgcaaacggaccag

SEQ ID NO: 251166 - RNA, 70 nt, Homo sapiens
aagaaacccaagcccacccggggggcagcacgccgaaggagagaccagacaacaggccagggaagggaag

SEQ ID NO: 251167 - RNA, 71 nt, Homo sapiens
gcgggaacagcagcagcaggaagaaacaaccagcaggaggagccagaaggcaaaaacgaaccaagggaagg

SEQ ID NO: 251168 - RNA, 83 nt, Homo sapiens
ggccgaccgagacgggcggagaggagaaggggaagaagagcgcaacaggaggaaaccaggggaagacgcaaggagagagccca

SEQ ID NO: 251169 - RNA, 56 nt, Homo sapiens
cggcccagccccgacacaggaacacaagccagaaaaagggggaagccagagagaga

SEQ ID NO: 251170 - RNA, 69 nt, Homo sapiens
cccaccgaaccacacccagcgacccaccccaacagaggaacgaaaacagccccaagacaagaaaagcga

SEQ ID NO: 251171 - RNA, 83 nt, Homo sapiens
gcccggcggcgacggcggggcagcgcaccggcaggcgggacaaggccgcagcacagccaccaaaacggagaagagagaaaacg

SEQ ID NO: 251172 - RNA, 90 nt, Homo sapiens
accgggcgccgacgagacggggcagcgggggcagagacggggaacagggccacccacacggacgccaacgcgggggcagaaccggagcgg

SEQ ID NO: 251173 - RNA, 81 nt, Homo sapiens
cccgggaccgggagcaagcacagcaaaggagaccaaaaccaggggacaagaggaggaacgaaccaaagaaaagcaaacgaa

SEQ ID NO: 251174 - RNA, 80 nt, Homo sapiens
cggcagccagcgcaagaggcgggcagcacgcgaaaaggcaaccccacggcggcggcggcggcaggaggcacccggacaca

SEQ ID NO: 251175 - RNA, 66 nt, Homo sapiens
accaggcgagccacaacgcgcaccccggaccaccccaccagagccagagaggcgacacaggggcac

SEQ ID NO: 251176 - RNA, 88 nt, Homo sapiens
aagcacgccacgggagcacagcacggcgaagcagcggagaagcggccaagaaggcggagaaggacccaaggcggagcaggccaaagga

SEQ ID NO: 251177 - RNA, 106 nt, Homo sapiens
gccgaagcccggggcgccccagccgaggaagagccgggaaagggcgcgccgccagagaacagaaacgcaacgggcgcgggaccggaaaaaccaagagagccagcca

SEQ ID NO: 251178 - RNA, 55 nt, Homo sapiens
gcggagcggagcggagcccggaggagccccgcgacaagagaagcaccagaagacg

SEQ ID NO: 251179 - RNA, 75 nt, Homo sapiens
caccggcacgaaaaacccgcagaaagccgccaggaagcacggaggaaagcggggaggacagcccgaggcaaaaag

SEQ ID NO: 251180 - RNA, 80 nt, Homo sapiens
ccgaggccccccagccagcagaaccaggcagcggcaccaacggacagggacaagaagaagcggacgcccccaacgaccgg

SEQ ID NO: 251181 - RNA, 76 nt, Homo sapiens
cagcacacgacaccccgggaccgcggggccaagcagagaggagccgcggaacggggagaccagcaaaagagccacg

SEQ ID NO: 251182 - RNA, 79 nt, Homo sapiens
ccacacacaccacaggccgggagcagagagccaaccgaaagcgcaggaagcgagcaacgccaaagccagggcagagaag

SEQ ID NO: 251183 - RNA, 75 nt, Homo sapiens
accaggcgaagcggccgagcaggcgagcgaacgacggccaaagagcacagggacagaaaaacagcgcagacgagc

SEQ ID NO: 251184 - RNA, 83 nt, Homo sapiens
gagcggaacaacgcggcgagcggggcaaagagaagaaaccaagagggaagaggaaagaagaaacccagagaaagcaaacaaaa

SEQ ID NO: 251185 - RNA, 86 nt, Homo sapiens
cagcgcaggaggacgaccggggggcaggaggcacccggggcaggaagaaggaccggggagacaggaacacgggcaagacagcgcgg

SEQ ID NO: 251186 - RNA, 68 nt, Homo sapiens
agccaacgaggccccgcagcgacgacggacagcaaggaaccccggacccaccaacaaccgaaaacagg

SEQ ID NO: 251187 - RNA, 69 nt, Homo sapiens
gaagcgccccgagccgcgaccaccaccagccgcacccagaggagcacgaacagaacagggaggcagcgc

SEQ ID NO: 251188 - RNA, 76 nt, Homo sapiens
cagacaagacacccgcagcggccggagcgggacggaaggggacacaggcaagaccacacggacgcacaacaggcag

SEQ ID NO: 251189 - RNA, 77 nt, Homo sapiens
acaccgcagaaaaccccagaggccaccaaccaccagcgccacccagggaaaccacgccgggacgggggagaaggaaa

SEQ ID NO: 251190 - RNA, 85 nt, Homo sapiens
gaaaagggacgcaagaaacccaggacgagaacagcaacaggagcccacaggcgacgcccccaagcggcgggcggggaggccacgg

SEQ ID NO: 251191 - RNA, 41 nt, Homo sapiens
ccgccagcgcccggagaacgcaaaagagccaacacccaggc

SEQ ID NO: 251192 - RNA, 65 nt, Homo sapiens
gaaacaacaacaaccaagccaaacaacccggcgggaacacaggcagacacaaggaaagcgacgag

SEQ ID NO: 251193 - RNA, 70 nt, Homo sapiens
agccgagggggaaaaggaagaaccagagaaagggagcaggaacagagaccaagaaggggaacagcaaacc

SEQ ID NO: 251194 - RNA, 84 nt, Homo sapiens
caaagagagcagcaacaaaagaaccagaagagccagaggaggagaggagacgccggagcgggacgaccagagaccgagagcggc

SEQ ID NO: 251195 - RNA, 76 nt, Homo sapiens
gagccgcggcggggggaaaaggagccccaccaagggccaggggaagaaggaagaagaacaggaagaaggaaagacg

SEQ ID NO: 251196 - RNA, 70 nt, Homo sapiens
agccagccagccacacggcagaaaaagaaaacaacgaacgagcaaggaagggccaaggcagaccccacac

SEQ ID NO: 251197 - RNA, 73 nt, Homo sapiens
cacggcagcccgaaaggagagacacggaacacaaggaagcaaaagcccagaaaccggcaagccgccaaaggga

SEQ ID NO: 251198 - RNA, 72 nt, Homo sapiens
agaaacgagggaaggccccaaagccggacgagcagaggagaccgaacgggggagaccagcggacccaaaaac

SEQ ID NO: 251199 - RNA, 56 nt, Homo sapiens
caacagagccaggaagcagcaggaggggcaggaggaacacaacagcagaaaaagag

SEQ ID NO: 251200 - RNA, 70 nt, Homo sapiens
ggggcccgggcccagacgaagcagcacaggcaagggcggaggacgaaaaggaacaagcgcaggacaaaaa

SEQ ID NO: 251201 - RNA, 53 nt, Homo sapiens
caccccgccccccgaccacccagcgggcgggacacaaaaaccggcggacccgc

SEQ ID NO: 251202 - RNA, 106 nt, Homo sapiens
aaaagcagcaaagaacaccaagacggcgaccacaggaaggacacaggcaggcacagggggacgaaacgaacgacagaaacccaagcagagaaaggggagaaagaag

SEQ ID NO: 251203 - RNA, 73 nt, Homo sapiens
gagaggagccccaggagcaggccccacacgaaaacgacggcacccggggcgccggaagcggcagaagcgccac

SEQ ID NO: 251204 - RNA, 74 nt, Homo sapiens
cagcagagaggaaaaacacaacccaagaaacggaccagaggggaggccgcgagcccggggagccccggaggagc

SEQ ID NO: 251205 - RNA, 75 nt, Homo sapiens
gggaccccgccgcggcgggaggaccggaagagcacaacgaaaacgccgggagccaaagccaacacaaggagaggc

SEQ ID NO: 251206 - RNA, 86 nt, Homo sapiens
cccaaccagcccgagcccggaaacaaagggaagggcaagggaaaaggagccgcaggccaggacgccacccgacaccagaggacggc

SEQ ID NO: 251207 - RNA, 65 nt, Homo sapiens
gaagagccgcgacacgcggagaggaaaggcaagggcagaaaagaggggaaaaggccagccgcacg

SEQ ID NO: 251208 - RNA, 75 nt, Homo sapiens
cgccgcccgccacacccgccgccaggcacacagagaaaaaaagggaacaaaacacagcaagcagacaaaaggggg

SEQ ID NO: 251209 - RNA, 79 nt, Homo sapiens
cggcgcggaccaaagcgggggagaacaccaggaaacaacaccggggcggcagaccaacagcaaggccgcaaagcgcagc

SEQ ID NO: 251210 - RNA, 72 nt, Homo sapiens
ggcgcgagaagacgaaccaaccagagagagaacacagacggcagagcagaccagacagcgccagccccaccc

SEQ ID NO: 251211 - RNA, 86 nt, Homo sapiens
ccaaggccgagagccggaacaaacgagggcccgggaggaccgacgcagccagaaacgacggagcagcagaagccgacaggagcaac

SEQ ID NO: 251212 - RNA, 36 nt, Homo sapiens
cgcccaggaaggacaaagacaaaacagaggagacca

SEQ ID NO: 251213 - RNA, 82 nt, Homo sapiens
cgcgagaacagagaagggagccaagcggagggagaacgcaagaggcaccaagcgaaggaggcagaagggaaagaaccgagcc

SEQ ID NO: 251214 - RNA, 40 nt, Homo sapiens
gcgcggaccgcggagcggccgaggcgagaaaagagaaagg

SEQ ID NO: 251215 - RNA, 78 nt, Homo sapiens
accggccgaggcaaggagaaagaacaaaccccgaagacgcgccgagcgggccacagccgaacgagaacgcccaagccg

SEQ ID NO: 251216 - RNA, 79 nt, Homo sapiens
cagaaggacgccagcggagaacgcggcaaagcgagaacaaagcagcagaacacaggaacacagagaagaagaggaagca

SEQ ID NO: 251217 - RNA, 74 nt, Homo sapiens
ccggggcgcgccccgagagaacgaggaggagccccacccgcgcagaaaacccagggaccagcggagcccagccg

SEQ ID NO: 251218 - RNA, 87 nt, Homo sapiens
cgggccagggcccgagcccgccccgaacccccgcgagcccgccgcgcggcggacggaggcccagggaagcaccgggcacaagacgaa

SEQ ID NO: 251219 - RNA, 62 nt, Homo sapiens
gaaggaagaggagcggagagaggcagaaagcagagagcgagcccaaaaagagaagaaaaaag

SEQ ID NO: 251220 - RNA, 37 nt, Homo sapiens
aacgccaagacagcaagagcgcgggacgacaaaccca

SEQ ID NO: 251221 - RNA, 77 nt, Homo sapiens
aacaacagcgaggaagaagaggacgacgacgacgaggaagaggaggcgagagccaagacccaccccgcggggcccca

SEQ ID NO: 251222 - RNA, 80 nt, Homo sapiens
ccgcggcggacacgcacgccccggcacagggagacgaggacgcgcacaggaaaggacgcggaacaagcaggcagccaggc

SEQ ID NO: 251223 - RNA, 72 nt, Homo sapiens
gacaagaaaccgggaggaaagaagacaagagagaacgcaaacaggaagcgaggacccaccgagggcgcgcac

SEQ ID NO: 251224 - RNA, 69 nt, Homo sapiens
gaggcagcagcaaaccggaagcacaccaggcaaaggaaggggaagacaggagaaggggaacgcgggccg

SEQ ID NO: 251225 - RNA, 86 nt, Homo sapiens
gccaaggcggccaagcacaacggcggcacccacgcagacaccagccgcgccagggggggccccagcccggccgaacgggcgcacga

SEQ ID NO: 251226 - RNA, 71 nt, Homo sapiens
gaaagaagaaaaccaagaaagccccacgggagacgcacccaaagggagacgaccgaagaacgaagaggaga

SEQ ID NO: 251227 - RNA, 77 nt, Homo sapiens
aaccaggaggccaaagaggaccgagacaaaccacggggcgaagaaaccacggcaaaaaaagaagcgagaagcacgcc

SEQ ID NO: 251228 - RNA, 77 nt, Homo sapiens
cgcccagcccccgagggcgggaacagggccggggccccgggagggccaccaccggacccgccagaccacagagcgac

SEQ ID NO: 251229 - RNA, 73 nt, Homo sapiens
acgacaaaaccagaaggaaacaccccaggaaaaacaaacaacacccaacagcccaaagcaaaggagcaacagc

SEQ ID NO: 251230 - RNA, 90 nt, Homo sapiens
cccgggccagcggccgcgcacccccggccggaggcaccagccccgggcgcgccaggcacagccaagagcggaccggcagcggccagcgca

SEQ ID NO: 251231 - RNA, 86 nt, Homo sapiens
gccggagcgcgaaggccgggacccggccccggcccacaggggggggcaaacccgagagaacggcccaggccgagcggcccgcgaaa

SEQ ID NO: 251232 - RNA, 75 nt, Homo sapiens
ccggacggcccaccgacacgcaaaggacagaaaacagccacgcaaagggaggaggagggagacagaccagaacac

SEQ ID NO: 251233 - RNA, 87 nt, Homo sapiens
ggagaaaaacggccaagaggcagaccaggaaagggcaaagaaaggcagaagagaggcaaaaacaaaggaaggaaaggaaaacgaccc

SEQ ID NO: 251234 - RNA, 83 nt, Homo sapiens
aggacggacaagcacagccggaaggagccccggcacaaaggaagaagaaagaagggagcaagagcaaaaaagaagaggagagg

SEQ ID NO: 251235 - RNA, 78 nt, Homo sapiens
cgacaagcggcggggcacgcgggacagaggaagagcccaggaaggagccaacccggccaaggccacgacgaaagagag

SEQ ID NO: 251236 - RNA, 52 nt, Homo sapiens
gcccaccccaaaccggcaaggcgggggaaaggccaagaacgccaggcaacca

SEQ ID NO: 251237 - RNA, 56 nt, Homo sapiens
cgagaacaaggcggagcccaagggaaaaacccgcagaaaacagggcacgagaccag

SEQ ID NO: 251238 - RNA, 89 nt, Homo sapiens
gaggcggcgggcgagggcgacacgaccaggaggcggccgccgcagcccaggcgcgggggcgacgacaggggaaagccccgaagcgaggg

SEQ ID NO: 251239 - RNA, 78 nt, Homo sapiens
gcccgcagcccccgccggccgcccaacaccgaacaccaacaaacaccgcgcagaacagaaccagagacaaaaaagaag

SEQ ID NO: 251240 - RNA, 55 nt, Homo sapiens
ggaagggagacggcagagacacccggcccggccgacacacagaccaaggaccgaa

SEQ ID NO: 251241 - RNA, 83 nt, Homo sapiens
agcaccccgagaaccgcaggagccagaggccaaaacagaagaggcaaagcccagccacagcagcagcccagcagcaaacaacc

SEQ ID NO: 251242 - RNA, 89 nt, Homo sapiens
caaggccggggcccacacggagaaagccccccaggcacagggaagaaggagaaagggccaaccccgaagaagcaaacagaaacgaagga

SEQ ID NO: 251243 - RNA, 88 nt, Homo sapiens
ccaccaccacgccagccgcaccagccgcccaagccgcacagccgcggcggcagcagcaggagaggagcacagaccagcgcgcgaccgg

SEQ ID NO: 251244 - RNA, 64 nt, Homo sapiens
cggcaagcaacaacgaacacaggcacgggaaagaaacaacgagcaggccgcagagacgggaagc

SEQ ID NO: 251245 - RNA, 70 nt, Homo sapiens
acccaaaagcagaccggagaacagcagaggaggaaacagccacaaggagcaaaaaaaagaaagggaagaa

SEQ ID NO: 251246 - RNA, 75 nt, Homo sapiens
gaggccggggggcaccagacggcaacagagggagaagcaaagcaacgccaaggccgcgcgagcaagacgggagaa

SEQ ID NO: 251247 - RNA, 80 nt, Homo sapiens
aaaaaggcgcggaaaaaggaacgaaccagaagccgaagccggagaaccaaggagagagcgaagcaccgcgcagaccgaaa

SEQ ID NO: 251248 - RNA, 72 nt, Homo sapiens
cacagagcgagaccaggaaagaagggggcagaagagggggagccggacggcccccgacccagacggccacag

SEQ ID NO: 251249 - RNA, 82 nt, Homo sapiens
ggcgggcccgggcgcggcgggcgcgcccgccagcgcccggagaacgcaggaacgaacaaacaccccagagagcccaggccga

SEQ ID NO: 251250 - RNA, 83 nt, Homo sapiens
ccagccacaggaggaaaggccagaccacagaaggagacgaacacaaggccacccaagcccccccaacaagaggcgagggcggg

SEQ ID NO: 251251 - RNA, 73 nt, Homo sapiens
aaacgagaaggggaaaaaacacaggacacgcggcagagaggaagcgacacaaacccgccgggcgggcaaccaa

SEQ ID NO: 251252 - RNA, 60 nt, Homo sapiens
gcgcgagcccaaaccaagcgcgacaagaaaggacccaccccgggacacgaccacgcagac

SEQ ID NO: 251253 - RNA, 52 nt, Homo sapiens
ccagcaccccgagaaccgcaggagccagaggacagagaggcgcaggcaagac

SEQ ID NO: 251254 - RNA, 72 nt, Homo sapiens
cggcgcgcccgcgcacagagcaacaaccgggccacaagagaaagagcacgggcacgaaggcaaagaccccag

SEQ ID NO: 251255 - RNA, 80 nt, Homo sapiens
cggggaacggaagcggagcagggaagacggagcggcggcccgaaggcccggcggccgccccggcccgggggggagagcgg

SEQ ID NO: 251256 - RNA, 85 nt, Homo sapiens
gcgccgcagcagcaccaggcggcagaggccagcaggcaccagcacccgagaaggagacagggaagagaggagaagaaagcacagg

SEQ ID NO: 251257 - RNA, 58 nt, Homo sapiens
gggacgaccggggcgggcgacagcgaccgacgccacacgccaccccaacccaagccag

SEQ ID NO: 251258 - RNA, 85 nt, Homo sapiens
ccagcaggggcaggccgaggacaccccacgaccccgagcacagcgcggacgcccacaggacgagcaaagaaaacaggagacaccc

SEQ ID NO: 251259 - RNA, 79 nt, Homo sapiens
gcggggcggagagccaccagggaggagcgaggcaaagcagagccgccccgcaaaacccgacgaagaaacaccgacaccg

SEQ ID NO: 251260 - RNA, 38 nt, Homo sapiens
aaagagccgcacagccgagacgagcacaacacacaaag

SEQ ID NO: 251261 - RNA, 92 nt, Homo sapiens
ggaagacacgagaccaggagacagaccaacaggaagccgccagacaaaagggacggggccaccggcacaagaagaaaagaaaggagggggag

SEQ ID NO: 251262 - RNA, 82 nt, Homo sapiens
gcgacagcagccaggagcagagcgacagcggcgagcagaacacggcgagcgggggggagacacagccagagcgaggaaaacc

SEQ ID NO: 251263 - RNA, 77 nt, Homo sapiens
gcgaaaagaacgccccaggagagagaaccgccaacggaccccgaggacaggaaaaacagggcaacggagacagaaac

SEQ ID NO: 251264 - RNA, 81 nt, Homo sapiens
acaggcgcggccgccgccccgcccccaggagagcgagcgagaagaaagccaaggcagcaggaagaagcgggaagaaaacca

SEQ ID NO: 251265 - RNA, 97 nt, Homo sapiens
gaaccacccagagccgccaccagggggagaccgaagagcgcaaaaaccgaaaccgcccacggggcccccaagccggcaggggaacgaggagggagcg

SEQ ID NO: 251266 - RNA, 71 nt, Homo sapiens
gaggaggcggcggccgacggggcggcgggagcagacaggggaacagaggcagccccccggaacccaaggcg

SEQ ID NO: 251267 - RNA, 75 nt, Homo sapiens
acaggaagcccacccaagacaggaagacggcacaaagagaggggcacagggccagagcagagggaggaagcggag

SEQ ID NO: 251268 - RNA, 84 nt, Homo sapiens
gagaagcccgaggcgcaggggcggggaggagacggcggaaaacggagagacggggagaaaaggaaggggagcacccgcacggcc

SEQ ID NO: 251269 - RNA, 69 nt, Homo sapiens
cgacccgcggcccccgaccgcccagccgcagaaagcaacaaagcgagagcacaagaaaacagccccgag

SEQ ID NO: 251270 - RNA, 84 nt, Homo sapiens
aacccccagacgcaagccaagggccggggggccccgcgggcagaagcgcccacgcagagagccaacagaacgggagggcgacag

SEQ ID NO: 251271 - RNA, 75 nt, Homo sapiens
cgaggaaagaagagcgagcaacgacaaacaccagggaccaagaaaggcccagggaccaaagcccggacaaggccc

SEQ ID NO: 251272 - RNA, 61 nt, Homo sapiens
gaagggaaggcgcgaggaggaaaggaggacgaggcgccacaggagccgcagaagcaaaggc

SEQ ID NO: 251273 - RNA, 59 nt, Homo sapiens
ccaaagcaaggcggccaaaggggggcgcagagagacggcccaagccgaaaacacggccc

SEQ ID NO: 251274 - RNA, 74 nt, Homo sapiens
ccgagagcgcgaaacgcacgagaaggaggaaagcggacgaaccccgggcgcggcaaagagaacgcccgcgcggc

SEQ ID NO: 251275 - RNA, 75 nt, Homo sapiens
gaacgggcagaccgcaggcacggggacaacagggcaggagaaagacagcaaagaaaaggagaagaaaggaaaaaa

SEQ ID NO: 251276 - RNA, 74 nt, Homo sapiens
ggagccacagacgaccggcacacagcagagagcaaagaagacagggaaccaaagaaacagagagggggaccagg

SEQ ID NO: 251277 - RNA, 70 nt, Homo sapiens
cagccaggccaccccgggaacgaggagccaccaagcccgaaggaggcgagacacagcaggacccaagcag

SEQ ID NO: 251278 - RNA, 64 nt, Homo sapiens
ccagggaaaaccagaccaacgagaagagagggcaggcgagaaacgggaccgcaaagaacaggag

SEQ ID NO: 251279 - RNA, 74 nt, Homo sapiens
cgggacccaaacggaaggaacggaggcgagccggggagcccgggaccagggccagggacgcccgcgaccccagg

SEQ ID NO: 251280 - RNA, 54 nt, Homo sapiens
cggcgcgccacacagcggagaacaaagaagccacagacaaagagggaggaacaa

SEQ ID NO: 251281 - RNA, 72 nt, Homo sapiens
ccgcacgcggaggcggcgcccgcgacccggcgggggcaaggaagcacggaggcccgggaacaaggacaacgc

SEQ ID NO: 251282 - RNA, 69 nt, Homo sapiens
ggacacggccggaccaggggagaggagaaagaagaaacagagcagaaccaacacagcaaaaaaagaaga

SEQ ID NO: 251283 - RNA, 74 nt, Homo sapiens
ggacaaccagcccaggcacagggagaccgggaggacacagagccagcagaagagaggcagcaaccgcccaaagc

SEQ ID NO: 251284 - RNA, 78 nt, Homo sapiens
cggggagcccaccccagcgcgacgcggcgagcccaaaaagcccgcaggggcgagggagcggaacccaaagcccaaaga

SEQ ID NO: 251285 - RNA, 82 nt, Homo sapiens
gcgccaaacaagaaaaacaaagccaaggaaaccccaacacagagccaagcgccaaacaccaaagagacaggaccgcagagcg

SEQ ID NO: 251286 - RNA, 42 nt, Homo sapiens
accccgccaccggccaccgccagaaccacaagaccgcaagcc

SEQ ID NO: 251287 - RNA, 81 nt, Homo sapiens
cccaacggcgggaacgggagcaagccaccccacgggcagcccagaaggagccgagagagagcacaggagcacgggagcagg

SEQ ID NO: 251288 - RNA, 76 nt, Homo sapiens
agagacacacagggcaccagaccgaaggccagggagaccgccacgacgagcgcaacagcgaccaccggaggagcag

SEQ ID NO: 251289 - RNA, 79 nt, Homo sapiens
cacaggccaccccagagcaagagcagcaccggacgggcccaccgcccaagaccggcccaaaggggcaccaggcccaggc

SEQ ID NO: 251290 - RNA, 68 nt, Homo sapiens
cggccacacaagcccacccccagcccccgaaaacacaagaaaagcacgcacagacagagccaacaccg

SEQ ID NO: 251291 - RNA, 56 nt, Homo sapiens
ggacggcgaggcgaaacgaagagacaggcccagcagccccgggagagacccagcca

SEQ ID NO: 251292 - RNA, 74 nt, Homo sapiens
cagccaccccccaagcccaggcagaaggcggcagggagcacgcaccaggagcccacggcccacccacagcgaaa

SEQ ID NO: 251293 - RNA, 68 nt, Homo sapiens
acacccagaagacgacggcacagcgcacaagaaacccaagcgcgagaacggccgagcgaccaggagag

SEQ ID NO: 251294 - RNA, 59 nt, Homo sapiens
gaaaagagaaggagagggagggcccaccaccgaagcagagacccgggaagaaaaggggg

SEQ ID NO: 251295 - RNA, 67 nt, Homo sapiens
cggcgcccgcgccacagccaccagagccggcagcaaagagggaacaggggacacacagccgaggggg

SEQ ID NO: 251296 - RNA, 78 nt, Homo sapiens
gacggaagaagcaccccagggacagcaaaggagagcgcaccgaggacccagcacagcagagaacaccagacaacgaca

SEQ ID NO: 251297 - RNA, 89 nt, Homo sapiens
aagagacaccagcggcaccggagaccaccggagcaccccgacacaggacacacaacagccccaagcggggggagcgcagggaggggccg

SEQ ID NO: 251298 - RNA, 34 nt, Homo sapiens
ggcagccggcccccggacccggccaggaccgcag

SEQ ID NO: 251299 - RNA, 62 nt, Homo sapiens
aaaaggacaaaaccagagacccaccgcgcgagagagcccaccacaaccaagcgagaggaccc

SEQ ID NO: 251300 - RNA, 77 nt, Homo sapiens
cagacaaccagagcccacaccgggcagagacaaacaggagagacagagccggagagggcgcccgaagggcagacagg

SEQ ID NO: 251301 - RNA, 76 nt, Homo sapiens
caagagcaccacagcacaggaaacagacaaagcagaggacggagccagacacgcaacgaaagagcaagccagacag

SEQ ID NO: 251302 - RNA, 78 nt, Homo sapiens
gccggcgcggccggcacacgagggagaagagccaaggagaccaaacccagcagcaccgcagcagcagaagaacaagga

SEQ ID NO: 251303 - RNA, 77 nt, Homo sapiens
gcaagaccccggggccccagacagagagcaggccaaagacaggcgacgaacacgaaaacaacggacacccccgggaa

SEQ ID NO: 251304 - RNA, 86 nt, Homo sapiens
gggcaggagggcggcggcggcggcgcggcgaagaaggggacgccgacaagggccgggccaggcggaaagcaggagaagcccaacgc

SEQ ID NO: 251305 - RNA, 72 nt, Homo sapiens
aggacaccaggcagaggcaaggccaagagcaaaaaaaagagcacaggaggcaaccaaagaacccagcgcaca

SEQ ID NO: 251306 - RNA, 76 nt, Homo sapiens
ccgcccgggcgcagcaaccaggcgcccccaagaagaaaaccgggaggcccaggagaagaaggaccagcccacaacc

SEQ ID NO: 251307 - RNA, 77 nt, Homo sapiens
cccggacaggaggacacgacggaggcgcaggccgcaggagggaagcgcacggaaaccgccccgggaggcacagagca

SEQ ID NO: 251308 - RNA, 84 nt, Homo sapiens
cgcccgccgggaggaccgagccaagagggcagccgccgaaggaacgcgacggcggcgcccgcaggaccgcgcagacgcgcagga

SEQ ID NO: 251309 - RNA, 72 nt, Homo sapiens
ccgcacccaggagggagggagggccagaagacggccgggccagacccgagacagaaggccaaagagacagca

SEQ ID NO: 251310 - RNA, 79 nt, Homo sapiens
gaccacagcaccgaaaacaccaggaaagacaggagaccaaaaagggggggccgaagaagccagggggaggaaagcagac

SEQ ID NO: 251311 - RNA, 80 nt, Homo sapiens
aggacaacgagaagaaccggaagccgacccggagccgagcaaccagagcccacaggcggggagcgcccccaggagcagcg

SEQ ID NO: 251312 - RNA, 76 nt, Homo sapiens
cagacggcgcacgcggaaaaagaaggggagcgcaaccaaacagcgcaggagaaaaccgaccaagagcgaacgccag

SEQ ID NO: 251313 - RNA, 57 nt, Homo sapiens
cagacacgaggacgggcaggcccaggggggcacgaacaacaagacaagcaaccaaga

SEQ ID NO: 251314 - RNA, 78 nt, Homo sapiens
cgcggagggccgagggagggccgagccagccgcggccggaggagcccccaggcccccaagaggaaaacgaggaggaaa

SEQ ID NO: 251315 - RNA, 70 nt, Homo sapiens
aaaggcaacaaagaagcagaagaagcgaaagaaagggaccaaaccaagacgaaggagcaagggcaacacc

SEQ ID NO: 251316 - RNA, 35 nt, Homo sapiens
cccgaacccagaaacccaggaacgcccggaagaac

SEQ ID NO: 251317 - RNA, 75 nt, Homo sapiens
ccccaagcggggcgcaggcggccgagccggccgggccgcgccacaccggcaccaagaaccacgaggccgaaagca

SEQ ID NO: 251318 - RNA, 59 nt, Homo sapiens
gccgaagcgcccgcgcggagggcggggcgcggggggcgcgagcggacaccccgaccacc

SEQ ID NO: 251319 - RNA, 78 nt, Homo sapiens
gagcgaggccagccagaacgccggggaccaggcccgggcgccgcaaaaggagggcgaccagaggcagccgggaagagg

SEQ ID NO: 251320 - RNA, 76 nt, Homo sapiens
cagacgggaggccacacacaaacaagcgggaacagcccgggccgccgcacccaccgcggagaagcacgcagccccc

SEQ ID NO: 251321 - RNA, 83 nt, Homo sapiens
gccaccaggcagagccgaggaagcgaagcagaggcccagaacaagggacaccgagcagcaggaccggaacccagagagagagc

SEQ ID NO: 251322 - RNA, 77 nt, Homo sapiens
cagagagaaggcagggcaaaccagaaagacggcaaagaacaaggagacacacggcagccaggccgaagggccaacca

SEQ ID NO: 251323 - RNA, 76 nt, Homo sapiens
aaaagggagcgaggaccaggaagcacaaagggaccccagccgacgaaccacggaggggggggaagaccaacacccc

SEQ ID NO: 251324 - RNA, 57 nt, Homo sapiens
gggagcccaaacgaaaagagaagacacgcaggcaaaaaagacacaagggagagcacg

SEQ ID NO: 251325 - RNA, 76 nt, Homo sapiens
gcagaccgcagaaggccggagacaccagcagggcaccccagacaggagcacccaacaccgggaagagccacacccc

SEQ ID NO: 251326 - RNA, 77 nt, Homo sapiens
ggaaaccagccccgaaaagaggaggcaaaccaagggacaaaaccgagggacaaaacgccggaggaagcaccaaccag

SEQ ID NO: 251327 - RNA, 89 nt, Homo sapiens
cccaagcgccccccccgccccccaggaggggcgagagggagccgcagcgagcagggaaaggagagacaagaggaagaacaagaaaggaa

SEQ ID NO: 251328 - RNA, 104 nt, Homo sapiens
agcgcagggcaacaagggcaaacaggggaagaagagaagacccaaaagccaaggcaaacagcgcacagcaagggcagaggaaaaggacaccgaagaaagacaac

SEQ ID NO: 251329 - RNA, 70 nt, Homo sapiens
gcggaaccgaaaaacaagaaggaaaaacgccacgcaccggagagagcacaggaagaagacggcacgggac

SEQ ID NO: 251330 - RNA, 70 nt, Homo sapiens
gccccgggcggagagcgaaggcaagaacggaagcacgggcggaggaaagcacaagcagagcccccgcaga

SEQ ID NO: 251331 - RNA, 79 nt, Homo sapiens
cgagcacaggcccccggagggaggaggagagcgggggcgggggagacaggacagccggcaccagcgaacagacccacag

SEQ ID NO: 251332 - RNA, 63 nt, Homo sapiens
cacccagaagagcgccaagaggagccagcacccccggaaaaacaccggcccgcacaccggcac

SEQ ID NO: 251333 - RNA, 82 nt, Homo sapiens
ggcagaggcagaaccacaggggagcggaacgagccaagacgcagcgacacaagccagagaaccggaaccaggccggaccgag

SEQ ID NO: 251334 - RNA, 70 nt, Homo sapiens
acacgccagcagaccaccccgggagggaggcacaaaaacaaaggacgaagaaaaagagaaaagagaaggc

SEQ ID NO: 251335 - RNA, 82 nt, Homo sapiens
ggaaaccaagacgccacccaggccgcaacccggagaagcaaggaaaccgaagaagaacccgagccaaagggaggaaaacaga

SEQ ID NO: 251336 - RNA, 82 nt, Homo sapiens
cccacccggaggagaggcccaggccagccggcggaggacacgaggaaaggagggcagccagagcagccccccagcgcccgcc

SEQ ID NO: 251337 - RNA, 73 nt, Homo sapiens
cccaggccccagcgcgagagacacaggaacgggcggagaacggaaaagcaccaggaagcagagaggaccgcag

SEQ ID NO: 251338 - RNA, 83 nt, Homo sapiens
gggccggacggggcggggggaacgagggcgaagacaggacggcccaggcagacacggaggaggaggaagaggaggagggcgac

SEQ ID NO: 251339 - RNA, 72 nt, Homo sapiens
ggccggcacaccaggccacagggcggacaaggaagacagaaggacaccccaccggggcgacaggagacaaga

SEQ ID NO: 251340 - RNA, 57 nt, Homo sapiens
gccaccgagcagaggagagccaggaaagcacaggcgggaaaaccgccacaaagcccc

SEQ ID NO: 251341 - RNA, 78 nt, Homo sapiens
gaccaccacaggaaagaaggggggcacgaacaacaagacaagcaaccaagaaagcgacaaggaccagacaaagaaaga

SEQ ID NO: 251342 - RNA, 78 nt, Homo sapiens
aacgaagagcaccgggagcggcgaagaggcaccggaggaggacaaagcacgggaaacaaccgaacaagacaagaaccg

SEQ ID NO: 251343 - RNA, 96 nt, Homo sapiens
gcaaagagccagaggggagacacgccaaagccccaagacaagggaggcgaggacggacaaaaggaaacggacgggaggccagccagcagaaggagg

SEQ ID NO: 251344 - RNA, 81 nt, Homo sapiens
aaaccgcgacagagggcaacaccaaaggaagggcggcgacggcggcgcgaggaccgaccgggcccgcggacgaagaaggca

SEQ ID NO: 251345 - RNA, 79 nt, Homo sapiens
aagaggcggacggcccggagagacgaaccgaagcgggcgggcccccccacccagagagggagacggggggcggccccgg

SEQ ID NO: 251346 - RNA, 78 nt, Homo sapiens
gggcgaggagaggagggaccccgcgaaagcccagagggaacccaccagaaaacgacacacaaacgcagccaacccaaa

SEQ ID NO: 251347 - RNA, 36 nt, Homo sapiens
gccaggggcccacggaggaccaggaaagagagccga

SEQ ID NO: 251348 - RNA, 75 nt, Homo sapiens
gcccaagcagcaaccaaaagagccaaggacccaaaaaccagggccaaggaaaaggaacagagagagcagaaccga

SEQ ID NO: 251349 - RNA, 66 nt, Homo sapiens
gacgacaacagacaccgggagccagaacaaagcaccacaccgaggggacacccgaaaggggcagaa

SEQ ID NO: 251350 - RNA, 71 nt, Homo sapiens
gacagggcgacccggcccggagaggaaaacccaagacaaggaagggcaaagcccacagcacaagaggcggg

SEQ ID NO: 251351 - RNA, 69 nt, Homo sapiens
acccggccccaagccggaagaaccgcagccgagcggggccggccacaggggcccagaagacaccgcgag

SEQ ID NO: 251352 - RNA, 62 nt, Homo sapiens
acacgcacggagacagagcaagggcaaaccagcccgggaacgggggcaggccggccgggagg

SEQ ID NO: 251353 - RNA, 68 nt, Homo sapiens
caccccccaccagccacggcgaacccccccaacggaacagcaccccccaagagacgaaagcccgaaaa

SEQ ID NO: 251354 - RNA, 76 nt, Homo sapiens
gaaaccacccacacccaccaacagaaacagacccaaacacgagccggaccaacacacacaccaggccaccacaggc

SEQ ID NO: 251355 - RNA, 66 nt, Homo sapiens
gagacgccgagcaaaagcccagaagggcccaaaacgacagacgcgaaaggggacgacgaagaggaa

SEQ ID NO: 251356 - RNA, 62 nt, Homo sapiens
gacaaccaggaccccccgaaccagaggcgaagagcagagagcgagggggaaaagcaaaagca

SEQ ID NO: 251357 - RNA, 88 nt, Homo sapiens
ccggcgggagcgcgaacgagcgacggcggaacccggggccgggacgcagcccggcggcagcaggagccaccgaggccacccgagcaac

SEQ ID NO: 251358 - RNA, 92 nt, Homo sapiens
gcaaagaaacagccccccgacagcccgggaagaagcagacacaagagagaaggcagaaacaaaaaagggagagaaaaagcccggcggggagg

SEQ ID NO: 251359 - RNA, 61 nt, Homo sapiens
gacagcccacacccggcgcggagggacccaaagacaggaccacgcaccagcagagaaggaa

SEQ ID NO: 251360 - RNA, 78 nt, Homo sapiens
gaggcccaggccgggcccccagccggggcgcgagccgggagccaggccacgcagaacaaaagacgcacagagacggac

SEQ ID NO: 251361 - RNA, 77 nt, Homo sapiens
ggagaccgcgcagcgccaggcccccaggcccaaagcggcggagagaagagggggcccgcccgcccgacacaaagccc

SEQ ID NO: 251362 - RNA, 82 nt, Homo sapiens
ggggcgcgcccgaagcaggaagaccggagggagcgcagcacagcggggggaggaggggaggaagacagaacaggaaagaaaa

SEQ ID NO: 251363 - RNA, 70 nt, Homo sapiens
aagccgcacaggggcagggaaccgaaagacaagacaaaacagaggagaccagaccagaagccccgaaaag

SEQ ID NO: 251364 - RNA, 56 nt, Homo sapiens
cggacaaggagaagaaacgcaaaagaccaagaccagggacccaaagacaggaccac

SEQ ID NO: 251365 - RNA, 79 nt, Homo sapiens
aacagaacaggcccaggggcaaccaggcagacccgaccccagcgcgaaaggagcaaagagaaaacgacgccaaaacgag

SEQ ID NO: 251366 - RNA, 71 nt, Homo sapiens
agagaaaggcgaggggcacccaacacgcacagcagccggggcaggccagggcagcccaagcagcagggacg

SEQ ID NO: 251367 - RNA, 71 nt, Homo sapiens
ccggaaaagaagcagaaaaagaaagccccgacagacaccacggacacccaaaagccaaccagggaccacgg

SEQ ID NO: 251368 - RNA, 51 nt, Homo sapiens
aggcggacaagagaagccgccagccaagcaggcaccaagcagccaccaagc

SEQ ID NO: 251369 - RNA, 78 nt, Homo sapiens
cggcccggggaaagcggcacgcgccccagaggggcgaagcgaaccgcgaccgcggcagcgcacaagagagcgagaaga

SEQ ID NO: 251370 - RNA, 75 nt, Homo sapiens
acgcaaaagaccaggagccgcaaagcaaagacgaggcaagacaacggcgaaaaagacgccaaggaagcagcccgg

SEQ ID NO: 251371 - RNA, 74 nt, Homo sapiens
gcgccgcgccgcgccgcaccccgagcgaccggggacgaagggaacccgccgggcggcccggcacccagcccccc

SEQ ID NO: 251372 - RNA, 55 nt, Homo sapiens
acaccagcaacaggcacacagcaaacaccccagcagggggcagaagaccgacacg

SEQ ID NO: 251373 - RNA, 65 nt, Homo sapiens
agcgagcagcacgggcaagcgggcagcgaagagagaggagcgagacccccagacccccccaccac

SEQ ID NO: 251374 - RNA, 80 nt, Homo sapiens
cagccggccggggccccccccagggagcacacaggacgcccagagcacaaccagagccaggaggggggaaggcaggcagg

SEQ ID NO: 251375 - RNA, 67 nt, Homo sapiens
gcccgccggaaaacccgcgggcccgagggcaggacagcaggcaccggcgaagcacagagaggcgcga

SEQ ID NO: 251376 - RNA, 78 nt, Homo sapiens
ggaggaacacagcaccagaaggaaggcacggaagccaagacgggcaaagccccaacaggacaaccagagaccaggccc

SEQ ID NO: 251377 - RNA, 84 nt, Homo sapiens
aggagcggccagagcagcagccccacaccacaaggcccacgccgcacagaggccgaagaaggagcacgcccccgcccccggagc

SEQ ID NO: 251378 - RNA, 61 nt, Homo sapiens
gcagaccgcacaaccgacaccagccaggagacgccgcaaggagacgagccaagggcacgag

SEQ ID NO: 251379 - RNA, 71 nt, Homo sapiens
gacccagccaaacaggacaagcagccagacgaaaaaccggagaaacccgaggacagcaaggccaaagcaac

SEQ ID NO: 251380 - RNA, 84 nt, Homo sapiens
ggggagcggaacggcgcgcagcagggccgcccagcggggcagcggaccggcccaaccagaacggccgcgagaaaaaaagaggcg

SEQ ID NO: 251381 - RNA, 83 nt, Homo sapiens
cgccccaggagcgcgagcccacaacacccccagcggccgccggccccccacgagcaaacggggacagcgccgaccggaacagg

SEQ ID NO: 251382 - RNA, 82 nt, Homo sapiens
aaaaccgaagaaagcaggccaggcagccaccccaacaacccagaaggcggagcccaccccgccaagaggaacggcacagacc

SEQ ID NO: 251383 - RNA, 77 nt, Homo sapiens
aggaagagccgggcagcccggagcgggccagggggggccccagcccggccgaacgggcgcacgacacaaacacaacc

SEQ ID NO: 251384 - RNA, 79 nt, Homo sapiens
aaacggcaagaaagcccgacaaaaagcgaagggccacccacccacccccacacaggagcaggccaaccagccaacagca

SEQ ID NO: 251385 - RNA, 68 nt, Homo sapiens
gggagaaggcaggcaccacaaaaaggacagagcgcagaggcaggcgggccgggggcagcgagcccggg

SEQ ID NO: 251386 - RNA, 78 nt, Homo sapiens
gagaaaaacggcagagacagcgccagaaccacggcaaaggggagaggcaccagcaacagaccaaccgcagcaagcaca

SEQ ID NO: 251387 - RNA, 86 nt, Homo sapiens
acgggcccaccgaggaggcggaggcagagagaggacaggaaccaccaggaggccacaaggagccacaaagaccggcggcggcgcgc

SEQ ID NO: 251388 - RNA, 76 nt, Homo sapiens
agagcccagggcaggacaccgacaggaacagggaccacggggggggagaggcaccagcaacagaccaaccgcagca

SEQ ID NO: 251389 - RNA, 75 nt, Homo sapiens
ggacagcgcacacagcaagcacgaggcaacaggagaggaaaaagagcagcgaccgcaaaggaacacaggaacacc

SEQ ID NO: 251390 - RNA, 82 nt, Homo sapiens
aggccacccggacccccaacacacccaaaaagagacagacacgccaagaagaaccagaagcggaaccggaagaagacgaaca

SEQ ID NO: 251391 - RNA, 82 nt, Homo sapiens
caggaaccaaaacgagcgggaggaaggagcagcgcgagggcagcaccagaccagagcacaagcccgacagcacacggaccag

SEQ ID NO: 251392 - RNA, 68 nt, Homo sapiens
gagggcacgaaggccaagcggacaccaacagcgaagaccaggcgggaaaaagggcacccaaacaacaa

SEQ ID NO: 251393 - RNA, 64 nt, Homo sapiens
gaccggaggagacacggcccgcaggcgccgaagaagggaggcccccccagcgccgccgcccagc

SEQ ID NO: 251394 - RNA, 73 nt, Homo sapiens
cggaaaggcgccacaagggacaccaagccccacccaaggcccacaggagaagccagcccacccgaggaacaac

SEQ ID NO: 251395 - RNA, 76 nt, Homo sapiens
cccggcccagcaggaccagagggccagccccggcaaccgaggggcacgaagagggaagaaggacgaggacacaagg

SEQ ID NO: 251396 - RNA, 81 nt, Homo sapiens
caacgccaaaagaaaaaggagggcaccagaaaaggcagaacagaccaagagaggaaagagagagcgccaaaaagagcccaa

SEQ ID NO: 251397 - RNA, 75 nt, Homo sapiens
caccgaggagacaagcggagcgagcgggagcccagcgacaagcgccccaagcagggaccggaccccccaaggacg

SEQ ID NO: 251398 - RNA, 79 nt, Homo sapiens
ccgacagccgcagaacggacgagccggggagccgggacgggcagggcgggaccacagggacccggccaagcacacaaac

SEQ ID NO: 251399 - RNA, 83 nt, Homo sapiens
cgcgcgccgccggcgaaggaggaggcggccgggccagggagaccagggggcaggggaggagcgcccaggcgaccggcgaacag

SEQ ID NO: 251400 - RNA, 71 nt, Homo sapiens
aaaccccagaggaggcgggcccggagcaggcaagacccccaggcaaaccgccccgcagcaccacccggccc

SEQ ID NO: 251401 - RNA, 56 nt, Homo sapiens
accgcgcccagaagcgaagggagagcgccagagaagggcggcaccaggacgccgaa

SEQ ID NO: 251402 - RNA, 60 nt, Homo sapiens
agcgaaaacagaccgcgagcccagaggcccgagagcccccagacaggggcacgaggaggc

SEQ ID NO: 251403 - RNA, 78 nt, Homo sapiens
agccccaagccggcggccaagacggagccgaaacaccgcccagccaagggggagggcagcgccaaacagcgcaaaggc

SEQ ID NO: 251404 - RNA, 74 nt, Homo sapiens
cgcgcagcggcccggcggggcccggcaccaggaccaccgcggcagcacgcggcggccaaacacacaggaacgcc

SEQ ID NO: 251405 - RNA, 39 nt, Homo sapiens
gggaacgaccccacagaccggagcagggacgagaaaggc

SEQ ID NO: 251406 - RNA, 67 nt, Homo sapiens
aagagacaaacccccacacaggacacaggggcggaaaaaacaaggcgcgggcacagggagggcggac

SEQ ID NO: 251407 - RNA, 70 nt, Homo sapiens
cgcgagccacgcaggaaaggaccaaacaggaggagaaccggaccgcgaaaaaccggacgaaaagcgcgag

SEQ ID NO: 251408 - RNA, 78 nt, Homo sapiens
cccacccccgacccgcggacggagagcccagcaaggagaagacgcagccgcagaaagcaaaaaaccgggaagccgacg

SEQ ID NO: 251409 - RNA, 54 nt, Homo sapiens
agaagccgaaagcacagacaagagcgcaggacaaggagcaccaagaaccgaccc

SEQ ID NO: 251410 - RNA, 73 nt, Homo sapiens
cgcgcgcccgaaggccaggacgacgaaccgcaccacggcgggaggccgcgcagccagagcaagaaagggcagc

SEQ ID NO: 251411 - RNA, 68 nt, Homo sapiens
aagaggcgccggcgggaaaacaacagccggcgcgggccgacccgacgaggagggcggggaagagaagc

SEQ ID NO: 251412 - RNA, 63 nt, Homo sapiens
aagacaccggacaccgagggcccccaaaaggcagcagcccacagaacagagcaggcccacgcc

SEQ ID NO: 251413 - RNA, 54 nt, Homo sapiens
acccacggcaagggcccgcggggacagaaaaacaaggggggggaaaagagccca

SEQ ID NO: 251414 - RNA, 56 nt, Homo sapiens
ccgccaggagggaccgggccaaaggggacaagaacccaagaaacaggaaaaaaccc

SEQ ID NO: 251415 - RNA, 90 nt, Homo sapiens
acacggccaggaaacgacacacaaagaaagaggagccggggacaccggggcggagaacggaaaagcaccaggaagcagagaggaccgcag

SEQ ID NO: 251416 - RNA, 67 nt, Homo sapiens
ggacggaaggcggccgagaggcgcggggagaggaacaacggacacaggaacccccggccacagcccc

SEQ ID NO: 251417 - RNA, 68 nt, Homo sapiens
gacccaacgggagcaggcaaggggagagccagagccccacaggacccgcccgacaacccaaccccaca

SEQ ID NO: 251418 - RNA, 80 nt, Homo sapiens
cgcggaggccgaaccccgaaggaaacacggagcgggcacccccaggcccccagccaacccgcggggcccgcggaagggcg

SEQ ID NO: 251419 - RNA, 73 nt, Homo sapiens
gagccagcgccggccgcgcgccgcgcccgcgccacagcacccaggggcaggacacggggaacgcggaaaggga

SEQ ID NO: 251420 - RNA, 76 nt, Homo sapiens
gcggcccgccaaagacaaagggcccggcaaagaagcccgggggaagacacagaaccgaccgccaagcagagggaag

SEQ ID NO: 251421 - RNA, 60 nt, Homo sapiens
aagaacacccaacccagcccaccccacagcagaacgaaaacaaacggaagagagggcagc

SEQ ID NO: 251422 - RNA, 76 nt, Homo sapiens
caaccggcgcaaggggacgccgcgcgcccgccgcggaacaggcgcccgaagggcaaaacagcagccagaagaacca

SEQ ID NO: 251423 - RNA, 35 nt, Homo sapiens
cacagggcgggagaagcaggaggggggagcccaga

SEQ ID NO: 251424 - RNA, 52 nt, Homo sapiens
agagaccaaacccccaccccaacgcaaccgggcccgcgacccaaaaggccca

SEQ ID NO: 251425 - RNA, 73 nt, Homo sapiens
agaagcgaggaggggagaaagaaaaaggggccaagaaccgcaagagggacggaaacagacgacgacacggaca

SEQ ID NO: 251426 - RNA, 68 nt, Homo sapiens
cagagacaaaggagcgaagagacaaacagagaagaccagaagggacagcgaaacagcaaccgagcagc

SEQ ID NO: 251427 - RNA, 81 nt, Homo sapiens
gcggaggccccagggaagcgcagaaagcaggcgaacccgcggcgcaaaacgaaacaagaagcagcagggaagccacccaaa

SEQ ID NO: 251428 - RNA, 76 nt, Homo sapiens
gcgcggccaaggaggagagcaccggaacccccaccagaagcaggagggaagggcaacaacccaccgggggaaacac

SEQ ID NO: 251429 - RNA, 74 nt, Homo sapiens
cacaagggaagaaccacaaaaaggaccggcaaaaaaagaggaaagaaaaacaacccacagcacggaaaacacca

SEQ ID NO: 251430 - RNA, 111 nt, Homo sapiens
gcacacggacgccaaccagccccggcaagaccgaaggcgccggccaaaagagggacaacccgccacaacgacaaaggaccccaaagaccccggaaggcggaccaggcacaa

SEQ ID NO: 251431 - RNA, 77 nt, Homo sapiens
caaggccaacgaggacccaagaggcccgccaagccgaggaggcagaggccgagccccacagacccccggcacacggg

SEQ ID NO: 251432 - RNA, 96 nt, Homo sapiens
ccaaacgcgccgacggcgaagaaaggggagcgaggaaaggggcggccgaggccagcccgagggcaacacccgagaccggcaagagcccagaggagg

SEQ ID NO: 251433 - RNA, 75 nt, Homo sapiens
cccccccgcgcccgcgaccgccgcggcgaagagacagaaaaagcacagaaacgcggaacagagaggaagcaaggc

SEQ ID NO: 251434 - RNA, 70 nt, Homo sapiens
agaaagcggaccgacacccggaaacgcgcggcgcaggaagagcagagcgcaaaggacgcgagcggcggca

SEQ ID NO: 251435 - RNA, 81 nt, Homo sapiens
agccacggagaagaagcgcggcccacacacccagccgggacgcaggagggcgacaggacaacggacagcaaaaaaggagag

SEQ ID NO: 251436 - RNA, 63 nt, Homo sapiens
gccgccggccgccgcggcgcaggcggggagagccacgagccaagggggcacgagcggacccaa

SEQ ID NO: 251437 - RNA, 75 nt, Homo sapiens
cgcccgcgccggcaccggggcggccggccaaagccaggccaggcaagacccgcccgccaagcgagcaggaaaggc

SEQ ID NO: 251438 - RNA, 74 nt, Homo sapiens
ccggacacgccagggacacccaaagcaaagggcagcaagacacgaagccgagaaagagcagcgacaacaaggag

SEQ ID NO: 251439 - RNA, 85 nt, Homo sapiens
gcaggggccaaggagcacggacggacccagcacgaggaggcgcgaggagagaaaaggcacggacgccacaggacgaagacggaag

SEQ ID NO: 251440 - RNA, 57 nt, Homo sapiens
ggaaccagaccgcaggcacaggacacggacgacaccgagcccaaccgaccaaccaca

SEQ ID NO: 251441 - RNA, 73 nt, Homo sapiens
caacagaaagagcaacagcagggcaacaggcaaggcggcaaacccccacgaagaggaggcggcagccggggag

SEQ ID NO: 251442 - RNA, 78 nt, Homo sapiens
agcaagacaccggacaccgagggcccccaaaagagcacccacgggccagaaaacaagacgaagaggacgagaaaggcg

SEQ ID NO: 251443 - RNA, 94 nt, Homo sapiens
cggggagaggggacccgcagaaaggggccggaacgcccgacacacagggcggcgacggcggcgcgaggaccgaccgggcccgcggacgaagaag

SEQ ID NO: 251444 - RNA, 83 nt, Homo sapiens
cgagccggagcgcggagcccggccccgcaccaggaggaggacgacagcacgaagcaagaaaggacagcaaagcgaagaagcaa

SEQ ID NO: 251445 - RNA, 80 nt, Homo sapiens
aggagccagggagcccagcacaggcagggggaaggagccacccccaacccgaaggcaacagcacagggacaacgcccaca

SEQ ID NO: 251446 - RNA, 86 nt, Homo sapiens
gggggacgcagggaggagcgggacaccccggaagcgggaaagcggagaagcggaggagaccaaggaggccaccaccacagaaggag

SEQ ID NO: 251447 - RNA, 60 nt, Homo sapiens
cccgcggccggcagccccggggcgcggagagggccgaggcagacaagggaaaggccgcgc

SEQ ID NO: 251448 - RNA, 55 nt, Homo sapiens
aacaaaagaagagaagaggacagcaggcaacagaccaaggcaacaacggaccaaa

SEQ ID NO: 251449 - RNA, 77 nt, Homo sapiens
gcagcgacagcagcggccagcgaccggagaagacgaagaagaccaggcaacgcacacaaaaacccaacgagaacagc

SEQ ID NO: 251450 - RNA, 60 nt, Homo sapiens
gcgggaaccgaccggcgccaccgcccagcacggagaaaggccaaagaagagacgaagcaa

SEQ ID NO: 251451 - RNA, 73 nt, Homo sapiens
gcagcagccacggcgcaaaaaggaccaggggcaagcgcagagaagagagaacaagagaaacaggcaacaacgc

SEQ ID NO: 251452 - RNA, 79 nt, Homo sapiens
aaaaaggaaagacagaaaagaagagagacaaaaacccaggagaaaccaaggacgaaagcaacgcagaagcaacaggacc

SEQ ID NO: 251453 - RNA, 49 nt, Homo sapiens
gcgcgcccagagccccgcgcagcccagggaagacgagacacagagcaca

SEQ ID NO: 251454 - RNA, 76 nt, Homo sapiens
cagggcgcccccgggaaacggagagaaccagagaaaaccaccaaaggccaggaagagccagcgccacaagcgggag

SEQ ID NO: 251455 - RNA, 81 nt, Homo sapiens
agaacgagagggccgagggcccgcagaaggaccagccccgggcaaaggcaaaccaaacgcaagaccagggcggagaaaagc

SEQ ID NO: 251456 - RNA, 72 nt, Homo sapiens
ccaagcaggaccacccaccagccaccagaacgaggaaccccagagaggacagaagccaaccaggcagcagag

SEQ ID NO: 251457 - RNA, 76 nt, Homo sapiens
ggagaagaccagaggaaggacaacgaaaagacaaggacccacccacgaggaccggcgaccacaacagaagagacgc

SEQ ID NO: 251458 - RNA, 85 nt, Homo sapiens
ccaaggacgaccgcgaaccaagagacgcgaggaagagaaaagacaagaagcaaaagcccagccggacgagccgagccacccagaa

SEQ ID NO: 251459 - RNA, 78 nt, Homo sapiens
gacaggaagagaagagaggcacgggggcaaaccgagggacacccagcgagcacaagcacaaggcggacagcaaacagg

SEQ ID NO: 251460 - RNA, 82 nt, Homo sapiens
cggccgacgacgcgcaaggcgggagggaccgaaccgcgcggccgaacccccgacccgccagaaagggggccgggcacgccag

SEQ ID NO: 251461 - RNA, 72 nt, Homo sapiens
gggaccagagaaccacaaccagacaagaaaagacaacaacgcaggaaggaagaaaacaggcgaaacaaggca

SEQ ID NO: 251462 - RNA, 103 nt, Homo sapiens
caagggcgagaccggcgagccgcaggaggcgcggccgagccccgacggccacccggcggagacaccaggcgccgagaaggccagcagagaaacaggcaggaga

SEQ ID NO: 251463 - RNA, 60 nt, Homo sapiens
agggccaaagaagggagagaggcagcccgaagcagcccaggaacaaggccccaacaggcg

SEQ ID NO: 251464 - RNA, 60 nt, Homo sapiens
cacaagaaaaccaccaaaagaaagacacaggccaaggggcacaagaacgaacagggcaac

SEQ ID NO: 251465 - RNA, 80 nt, Homo sapiens
cggcaccgcgggcgcaagcgcaaccgcgggggcggggacggcgccgagaggcccagaaggggaagacccccagcgaacag

SEQ ID NO: 251466 - RNA, 85 nt, Homo sapiens
gagaccgcagaaggagcggagcggcagcagaaggagaggcacaagaaaaggaagcaaggaaaaggacagcaaaaagaaacgacaa

SEQ ID NO: 251467 - RNA, 80 nt, Homo sapiens
agcaggaggcccacaagcagacacaccggacaagaccgacgaacacacgagaccgaagcagagcggagagccaggacgga

SEQ ID NO: 251468 - RNA, 70 nt, Homo sapiens
gaccgcagggccagggcgcagacgccggaaaaaggagcagacaccagggcgggcgcacagccagccagcc

SEQ ID NO: 251469 - RNA, 84 nt, Homo sapiens
aagaaacccacacagaaggaaacacgacaaccaccaccagcgagcaaaagaacaaagaccaagaccaagaagcgccccagcggc

SEQ ID NO: 251470 - RNA, 68 nt, Homo sapiens
gcgcacgggcaaggcgacaagcagaaaaccaaggagcaggccccgcgccaccgccagggaagagccaa

SEQ ID NO: 251471 - RNA, 74 nt, Homo sapiens
gagcagaggcaaggccagcggggcgcccaggaggcaccacagcggaaaaagggcggaagaaacgaaggaagaag

SEQ ID NO: 251472 - RNA, 67 nt, Homo sapiens
acgagcccaaagaccccacagggcagcacacggaagggaggggacagagccgaggacacagacccca

SEQ ID NO: 251473 - RNA, 112 nt, Homo sapiens
acaccagccaagccaagacagggaggggacggaaacgccaccagcaggaggaagagccaaagcggacgacgcgccaccggccacgcaacccccgccgacccgcccagccgcc

SEQ ID NO: 251474 - RNA, 56 nt, Homo sapiens
ggagacgcgcccgccaccaagcacacccgcaaggcgaccacggcccaccaacaaac

SEQ ID NO: 251475 - RNA, 59 nt, Homo sapiens
aaaacacagaccagaggacggcacaaaggagaggggaccaggaggcaaaagaaacaaaa

SEQ ID NO: 251476 - RNA, 78 nt, Homo sapiens
ccaccagacagacgcgcaaaacccagcaccagagcgcgggcggagacccacggggagagacccagaagagccggaccc

SEQ ID NO: 251477 - RNA, 76 nt, Homo sapiens
gacgcaggagggagagcacagcaagagccaggaccaccggaagccagaaagcggaacacaagaaggaccggggacg

SEQ ID NO: 251478 - RNA, 105 nt, Homo sapiens
cagcaacccacccccccgggagcagggcagcacccccagccgcagcccccgcgagcccaaaaggcagagcgaggagagaagaaggagggaaagccaaacaacgga

SEQ ID NO: 251479 - RNA, 84 nt, Homo sapiens
caggaccaccaggccacgaggagggcgcgagaagacaaaggcaaaagcagaccggaaaacccaccggcaagaccacacccgagg

SEQ ID NO: 251480 - RNA, 78 nt, Homo sapiens
ccccccagccgcaccaccaagaaaacgcgcgaaaagcaggagaagagaaacaggacgcgaggaggagagaggagaggg

SEQ ID NO: 251481 - RNA, 75 nt, Homo sapiens
agcagaaacacagaccacacaagcggaaaagccagggcggaaaccggcaagaggaagagaaagaaaaaaaaccca

SEQ ID NO: 251482 - RNA, 80 nt, Homo sapiens
caaaaacggagcacacgccccaaggagggaccaagagcaggcgagcccgggcgccaccagccgggacagcccagcaacgc

SEQ ID NO: 251483 - RNA, 95 nt, Homo sapiens
aggcaggcgccagacaaccaggcaagcggaagaaccgaacacacaaaggaagaagaaagccaagcaaaacgcaagccgggaccgacagcggaccc

SEQ ID NO: 251484 - RNA, 77 nt, Homo sapiens
gagacgcgccgaaaaagcaaagcaaaaaaaaaggaacagcccaacaaaagcgaacgcccaagcaaaaacagggacag

SEQ ID NO: 251485 - RNA, 75 nt, Homo sapiens
gcaaggccccccagcgcagggagaagaagggggacgggggacacgcccgaggaaaaggggccggacagacagcaa

SEQ ID NO: 251486 - RNA, 73 nt, Homo sapiens
cggccagcccagcccccgccgcgcaaggcgccaccggaagaaacgggaggggaggagccgggaaagacagcgc

SEQ ID NO: 251487 - RNA, 63 nt, Homo sapiens
cggcaagggacaacggccaagggagcagagcgcagcacggagcgccagaccacgggaggaaaa

SEQ ID NO: 251488 - RNA, 84 nt, Homo sapiens
gcccccgggggacggaggaggccgcgccgagaaccgaccgagaccgcgaccgcacaagcagccgccagcggaaccaagcggcgc

SEQ ID NO: 251489 - RNA, 86 nt, Homo sapiens
gcggcacacaacacggcgcaagcggcgcgccagagcggcacgaggcacaaaccgaagagcccggggcgggacgccacgaaagaaag

SEQ ID NO: 251490 - RNA, 72 nt, Homo sapiens
agcacgaaaagaacaggcaggcagcacccagcagagacgaagccagcggagaaaaaaccaaacagacagaac

SEQ ID NO: 251491 - RNA, 81 nt, Homo sapiens
cggacggcgagggccccccgccgagaacagcgaggagcgagaaagaaaaacagggccgagcaccggagaaaacacaaaccc

SEQ ID NO: 251492 - RNA, 76 nt, Homo sapiens
agagagcccgggcccggccgaacagaaaggagagcaaaaaaccggcacagggagaaggaacacagcgacagccaga

SEQ ID NO: 251493 - RNA, 72 nt, Homo sapiens
gagcccagccagcgcccggcagcccgacgcgagccgccggagcgaacggaagcagaagaaagaaggcaagcc

SEQ ID NO: 251494 - RNA, 83 nt, Homo sapiens
gggaccggagcaccggcagacccggggaccgggaaggcgaccccgcacacacacccaccagccacggcagcccagcggggacc

SEQ ID NO: 251495 - RNA, 88 nt, Homo sapiens
aacagcagcggggcccaacccccacggcggcggggcggaggggcagggcggaccagaagcgagcgccgcagcgggaaccgcaagagcg

SEQ ID NO: 251496 - RNA, 82 nt, Homo sapiens
cacaccacagacccgcgccgccgacgacccagcagccgccaggccgcccgagcagacgccagagcggccccccgcgaaacag

SEQ ID NO: 251497 - RNA, 41 nt, Homo sapiens
aagaaaggaacgccccaacagagggcccccacccccgagga

SEQ ID NO: 251498 - RNA, 76 nt, Homo sapiens
caccgccagcccggaggagccccagcagaagcccagcggcaaaaaccaggcagcaggccaaccaaaagagacccca

SEQ ID NO: 251499 - RNA, 72 nt, Homo sapiens
ccgaagcaacccccccacggcagggacggagacaggaaacagaacgacagcccgcaccgacgccggcggcca

SEQ ID NO: 251500 - RNA, 68 nt, Homo sapiens
cccgcgccgggagaaggcgccccgcgccagaggccccccggacagccagagaaccaaaggcagaccac

SEQ ID NO: 251501 - RNA, 71 nt, Homo sapiens
cgagagccaacgcaaccaggcgcaggacacacagagagaaaacagcacaggaaacacagaagaagagaaaa

SEQ ID NO: 251502 - RNA, 78 nt, Homo sapiens
cgcacaacgggaagccaagcaacagcccacagagaaagaagccaacacaaaccacaaaaacaacaaggccaccaaacg

SEQ ID NO: 251503 - RNA, 78 nt, Homo sapiens
ccacccagagcaacgccagcccgcaaacccacagggagggaaacagcgaaaagcaaccagcagaccgggagcagacaa

SEQ ID NO: 251504 - RNA, 54 nt, Homo sapiens
ccaggaccagaaccggccacggcaccagagcggaggcagcggcacagcaggcca

SEQ ID NO: 251505 - RNA, 73 nt, Homo sapiens
caagccgccagaggaaaaacccacagacaacacggaggcaaggaggccacggggccgaagacaccaaccgggc

SEQ ID NO: 251506 - RNA, 86 nt, Homo sapiens
cggccgggccccgcgcccgccccggccagggccgccccgggagcccgcgaggagaccggagacaaaaagaggccaagaccaagagg

SEQ ID NO: 251507 - RNA, 76 nt, Homo sapiens
ggggcgccaaaaaggaaaaccgccaaggaccgaccccaaacgcggcagacaggccaagccaagaaccacaccacac

SEQ ID NO: 251508 - RNA, 83 nt, Homo sapiens
gaaacgacggagacgcagagggacgaaagaagcgcagcggaggaaggcgagcccggaagaggccgcccagggaggccaagcca

SEQ ID NO: 251509 - RNA, 73 nt, Homo sapiens
gcccgccccccagcaccgggcggacgggcggagaacggaaaagcaccaggaagcagagaggaccgcagaaggg

SEQ ID NO: 251510 - RNA, 68 nt, Homo sapiens
aaaggaacccaggcgcccaaggaaaagagcaagagcccaaagacaacaggcccccccgccccccgcgg

SEQ ID NO: 251511 - RNA, 79 nt, Homo sapiens
ggaggcaccagaccacacccggccggagcgccacaccaaggccaagaacgggcaccggcggaaaagaggacagccaacc

SEQ ID NO: 251512 - RNA, 76 nt, Homo sapiens
ccaacgagggcaagaccagagagccgcggggaaaggaggcaagacccacaaaccaccaccaacacagaaagccaga

SEQ ID NO: 251513 - RNA, 79 nt, Homo sapiens
gcggaggcgacgaggaggcggacccccggcgcagggaaacacaaagaagacaccagaagggccagcaccacgacaacac

SEQ ID NO: 251514 - RNA, 90 nt, Homo sapiens
ggaggaccgagccaagagggcagccgccgaaggaacgcgacggcggcgcccgcagggcggagaacggaaaagcaccaggaagcagagagg

SEQ ID NO: 251515 - RNA, 73 nt, Homo sapiens
agcgcagagaaacgacccgaagagggcaagaaacccaaccccaagacaccaaggaacagacaagaaaaaggga

SEQ ID NO: 251516 - RNA, 74 nt, Homo sapiens
gcaacgcgccgcaaaacagaacgcggaacgcaagcacaggaccagaaacgaaaggcagcagaagaggaaagcca

SEQ ID NO: 251517 - RNA, 65 nt, Homo sapiens
cgcggccccgcgcaagcccaccgaaaaaggggggacaggaggagagacacaacaacgaggacagc

SEQ ID NO: 251518 - RNA, 55 nt, Homo sapiens
gcggaccaccgcccgccccgaaagggcaagcagaaaccgggaagggggcgccggc

SEQ ID NO: 251519 - RNA, 69 nt, Homo sapiens
ggggccggggaccccaacgaaggaaagagcacaaaccacacgcccaggcaaagcgggcgcaacaaccga

SEQ ID NO: 251520 - RNA, 75 nt, Homo sapiens
gaggaagccgccagaaaccagcaaaaggacagagacaggaaaacagacacgagagggaagaaacccaaacggagg

SEQ ID NO: 251521 - RNA, 70 nt, Homo sapiens
gagaggccgcggcgcccaggagcacccagggaagcacggcccaacgccggacaggagagccgagagccaa

SEQ ID NO: 251522 - RNA, 73 nt, Homo sapiens
ggaggcgaggagaaggaggagcgggccgggaggccgccgccaggcaggaaaggaggacacgaacaagaaggag

SEQ ID NO: 251523 - RNA, 80 nt, Homo sapiens
ccccggagagcgggaacaggacaagcagcgcggacgaccccagaacaaagccgcgggccccagggaggggggcaagcggg

SEQ ID NO: 251524 - RNA, 84 nt, Homo sapiens
ccccaccccgacgaccggaccgaggaggcagcgcggggcagcgcgagccgggaagcacaggaagccggagaaccgaaggaccgc

SEQ ID NO: 251525 - RNA, 77 nt, Homo sapiens
acagaacagcaaaagcgaagcagacagccgcacacggggcccgaggcgggggcagcagggccagcaccggcaacgcg

SEQ ID NO: 251526 - RNA, 75 nt, Homo sapiens
gagaagccaaggacacacgccgggcgacacaacaagaccaaccgaccggacacagggaaagagccgcagacgcac

SEQ ID NO: 251527 - RNA, 81 nt, Homo sapiens
aagagcggaggcgcccggcggagcagaggaaccacacgcgacagacccaacagaggaagccgcaagaaacgggacgacagg

SEQ ID NO: 251528 - RNA, 57 nt, Homo sapiens
aggagggagagggcccaggaagaggcaaggcaagcagaagaggaacagaagaagcag

SEQ ID NO: 251529 - RNA, 78 nt, Homo sapiens
ggagaagagcagccagcaagcggaggacagcaggcagaagaccccacccgggccacccaggagcccgaggcaaggcag

SEQ ID NO: 251530 - RNA, 78 nt, Homo sapiens
caccacaaggcacgaagaaaggggaccacaaaaggcaaagcaaaccaaaggagcgcccggaagaaacaacgggacaca

SEQ ID NO: 251531 - RNA, 68 nt, Homo sapiens
cacaaggagcaaaagcacaacccgcagggaaggcacacaagcaaagccaacccagaacaaagagacag

SEQ ID NO: 251532 - RNA, 65 nt, Homo sapiens
ggggaccggaaccggaggagaagcccagggagcgcaccccaggaaaccaagagaggaacaaacag

SEQ ID NO: 251533 - RNA, 77 nt, Homo sapiens
acagggccggcagggcagccgggggacagcgaggaagggcaaagaagacgagaccaacgcgcgggagcgccaaaagc

SEQ ID NO: 251534 - RNA, 43 nt, Homo sapiens
gccaaccgcgagaagagacccaggaagagagagaagcagagga

SEQ ID NO: 251535 - RNA, 34 nt, Homo sapiens
gagccagcagcggacacacacgccgaggagccaa

SEQ ID NO: 251536 - RNA, 65 nt, Homo sapiens
gcaggagcagaagaagccaaaaacacggggcaagaagacaagccccggaccgcggccaagaagac

SEQ ID NO: 251537 - RNA, 56 nt, Homo sapiens
aaaggaaaaaaaagggaaaaacacaaacgaccaacagggcggaggcagggcacagc

SEQ ID NO: 251538 - RNA, 83 nt, Homo sapiens
gagccggccggcagagcgcacgcggaggcggagcgaggaccggggacacaggcccaggggaagacagggagcagccacccccg

SEQ ID NO: 251539 - RNA, 51 nt, Homo sapiens
gcaaccacgagcgagggcgcggcccagaaagggaggaggacaggagaacgg

SEQ ID NO: 251540 - RNA, 80 nt, Homo sapiens
ccgcggcgccgaggagcccaccggagcaggagacaaaccaccaggaacccgaaaccaaacacggagggaaacaggaggac

SEQ ID NO: 251541 - RNA, 89 nt, Homo sapiens
caaccaccagaagaacgacagagaggagggagaacaagcaacggcgggaggagagaaagaacccacgcaggacgacagaagaggccgga

SEQ ID NO: 251542 - RNA, 83 nt, Homo sapiens
aacccgacacccacaccacaaccggccggccggcaacaccgagcaaccaagcaagccacagaaccaaggcccagcggcaggcg

SEQ ID NO: 251543 - RNA, 84 nt, Homo sapiens
cagacggcaagacggcggcggcagcggcgagcaccccagcgagagcggacacagcaccggaggagggccacccgcccacagcca

SEQ ID NO: 251544 - RNA, 70 nt, Homo sapiens
aagagcaacaaagaccgaaacagagcacagacggacccacaggaagggacggaaaaggagcccaccaacg

SEQ ID NO: 251545 - RNA, 76 nt, Homo sapiens
gccaccagaaggaggagaggcgccaggaggagcagccaacaaagagagcaacggaagagaggaaacgagaagaaaa

SEQ ID NO: 251546 - RNA, 73 nt, Homo sapiens
gggaaagccacgggaaaaggcagaaaagagccggagacagcgagccagcagagaagggcaaaacgaaaggagc

SEQ ID NO: 251547 - RNA, 67 nt, Homo sapiens
agaagagcaaccaaccaacagcaaaacagggccaaaaaagccaccaagagagacacccggggggcaa

SEQ ID NO: 251548 - RNA, 81 nt, Homo sapiens
agacacagccagccaaacacaccaacaaaaagaccgggacaggaaccggaaaacaggccggcccgagccagaccagcagga

SEQ ID NO: 251549 - RNA, 74 nt, Homo sapiens
agccagacccggggaggcgcacacacaccaaagcgacgcggccgaggcagccgaagcgaagcgaaaggcgggaa

SEQ ID NO: 251550 - RNA, 78 nt, Homo sapiens
gcagcgaggcaggagagggagggccccagaaaaccggcgcagagccaaaaggaaccgaggaaaagcaggggaaacgac

SEQ ID NO: 251551 - RNA, 60 nt, Homo sapiens
agagcccgggccacccccccaggcaaggaagggccgggccggggcacgggcccacggccc

SEQ ID NO: 251552 - RNA, 81 nt, Homo sapiens
ccgcgcccgcgcccagcccgggccccgcgcacagccccagcgcagaacccaaaacgccgaacacgacagccacaagagacc

SEQ ID NO: 251553 - RNA, 61 nt, Homo sapiens
gaccccaccagcaacggagacaggccgagcagaccccccagagggcagcacccccaaccac

SEQ ID NO: 251554 - RNA, 95 nt, Homo sapiens
aggcaccaagagccaaccgagggcgccgagaagccagcacgccgggagcggacacagcccaggggaacagcgcaccaggaacccggcaccggcgc

SEQ ID NO: 251555 - RNA, 82 nt, Homo sapiens
cgggacccggccccggcccacaggggggggcaaacccgagagaacggggaacggccagcaccaagggcaccaggagaaaggg

SEQ ID NO: 251556 - RNA, 86 nt, Homo sapiens
caggacaccgacaggaacagggaccacggggcccgggcgcgccaggcacagccaagagcggaccggcagcggccagcgcagcggcc

SEQ ID NO: 251557 - RNA, 83 nt, Homo sapiens
cgcgacaccgccccccgaccggggcccgcgggccaggccggggcgggcacggcccgcgagaagacggcagcgaacgagaagag

SEQ ID NO: 251558 - RNA, 84 nt, Homo sapiens
agcgacacccgaggggcacacagaaaaggcaccgcccggcccaaagaaaaacccggaccaccaagcaggccaagcagcccaaga

SEQ ID NO: 251559 - RNA, 73 nt, Homo sapiens
acggccggccgcgccaccgcaccgccaccggcccgacccaacggaacagccccaagccggaaacccaggaacg

SEQ ID NO: 251560 - RNA, 67 nt, Homo sapiens
ccagaagaccagaagcgacaaaagcaggaccggcacgcgccggcagggcgaaggcaggccaacaagc

SEQ ID NO: 251561 - RNA, 77 nt, Homo sapiens
acgagccaggaggccgcgcggcgagagaggagaaagcacacccaaaggcaaggcagccccggcagaaccagagggac

SEQ ID NO: 251562 - RNA, 71 nt, Homo sapiens
cggagcccagaagacagagggcgaggaccgaacaacagggcggggagggaacaccaagagccaccacaggg

SEQ ID NO: 251563 - RNA, 61 nt, Homo sapiens
ggaaccacacggacgggcagagacggcccacaaggaggcccagaaggagggcggagcaaag

SEQ ID NO: 251564 - RNA, 83 nt, Homo sapiens
aaaaaggagggaaaaaaccagcaaaaccgcgcaaagcaacaggcaaaagcccacagggcgccccacggaggccaagaaagccg

SEQ ID NO: 251565 - RNA, 40 nt, Homo sapiens
acaagaggccccaacgcagccgagcccacagccacgaggg

SEQ ID NO: 251566 - RNA, 75 nt, Homo sapiens
agaggcccaggccgagaggacccggggcaaggggagcggcccaaagggcgaggccccggcaaagaggcgccgggc

SEQ ID NO: 251567 - RNA, 73 nt, Homo sapiens
gcacaggcgcccgcccgcacgggcgcgccaagggcacagagggagaggcccagacaggggaaaaaggacaccg

SEQ ID NO: 251568 - RNA, 76 nt, Homo sapiens
cccgaggaccggccgaacggcgcaggggccgcgcggcaaggggacggggaaagccggaaggccaacgcaagcccac

SEQ ID NO: 251569 - RNA, 68 nt, Homo sapiens
ggaagaggggccccaccagacagggaccggcggcaaccggaaggaacggagcggaacacaaacaggca

SEQ ID NO: 251570 - RNA, 72 nt, Homo sapiens
agaaaaaagaggaaccaagaaacaagaccagaagagagggaaggaaagaggcagaaggccagaagggcgaag

SEQ ID NO: 251571 - RNA, 73 nt, Homo sapiens
gaaaaagaagagagagacacggacaagagacgcggacagggggccagagcaaggaaagcggaagaaggcgaca

SEQ ID NO: 251572 - RNA, 78 nt, Homo sapiens
cggaaaaggaaaccccagccgggacgggcgaagacaaagcaagccccgcccccggagagggaacagaagggaggaaac

SEQ ID NO: 251573 - RNA, 71 nt, Homo sapiens
cggccggcgggagacgcagcgcgacccagcaggggaaccagaagaggccaaccagcacgaacgccagcagc

SEQ ID NO: 251574 - RNA, 68 nt, Homo sapiens
acgaaggacgcacacaggacaacaaccccaggccagacaaacaagagcagcacaaagggaaggagcag

SEQ ID NO: 251575 - RNA, 56 nt, Homo sapiens
ggaggagggaccaacagcccgcgcggcagacaagggcaggaggcagagaacaaggc

SEQ ID NO: 251576 - RNA, 76 nt, Homo sapiens
acgagaaccgcagcccacacgcgggcaccggggcccacagaacaagcagccacgggacagggggcgccccgcagag

SEQ ID NO: 251577 - RNA, 78 nt, Homo sapiens
accccgacagcaccaacggcagagaccaagaggcacaccgaaacggaaaggacagggagcaaccagcaccccggggca

SEQ ID NO: 251578 - RNA, 68 nt, Homo sapiens
cccaaacgcacaagcaaaaccacccacagagggaagggggcagggaaccagagagaagaggaagagaa

SEQ ID NO: 251579 - RNA, 74 nt, Homo sapiens
cgaaagggaagaaagacagaggagggaaggaaaacagggcgcagaaccccaggaggcagagaacaacagccaca

SEQ ID NO: 251580 - RNA, 63 nt, Homo sapiens
ccccaagcaacagaagcagccagcagaggcgcagggccagcagggggcagaaacgggacggga

SEQ ID NO: 251581 - RNA, 89 nt, Homo sapiens
gccacgggggccgccgcagcaccaggcgaccaccgcagcaccagcgcgggccgggagccgcccgcggagagcacagcccccccagccgc

SEQ ID NO: 251582 - RNA, 73 nt, Homo sapiens
ccggaacggcggcgacaaggggcccgaacagaggggacaggagagacaacggaggcaagaaagacggagaagc

SEQ ID NO: 251583 - RNA, 59 nt, Homo sapiens
gaaaccacgggaaccggaccacgagaggagaagagcagaggagggagaaaaacgagccg

SEQ ID NO: 251584 - RNA, 83 nt, Homo sapiens
ggcggagacgccgggcagccgaacggagggcgacggagggagcgagcccccagcagccgcacgggaggagggccaggaccagg

SEQ ID NO: 251585 - RNA, 62 nt, Homo sapiens
cgccccgccggcccaccccggggagcaacaggacaagggaggcgaggacggacaaaaggaaa

SEQ ID NO: 251586 - RNA, 36 nt, Homo sapiens
cccgagagcgggacgcagaggaacaccggcccaggc

SEQ ID NO: 251587 - RNA, 79 nt, Homo sapiens
gaacaggcgcagggaacacgaaggaagccggaccccggggaaggggaagagggaggaagggaagcgagaaaacagggag

SEQ ID NO: 251588 - RNA, 47 nt, Homo sapiens
aggaacacagaccgcacagacgaaagcaccacagaagagagcgagcg

SEQ ID NO: 251589 - RNA, 72 nt, Homo sapiens
cacgagcaccgcgccggcccagcaccccgagaaccgcaggagccagaggggcgcgggcaggacaccgccgcc

SEQ ID NO: 251590 - RNA, 56 nt, Homo sapiens
cagcacaggcggcgccccggaacgggagcgcagcaaaagagccaacacccaggcca

SEQ ID NO: 251591 - RNA, 72 nt, Homo sapiens
acaagaggacacgaaggggccacccaacccccacaccgagcagaagaggggcggcaagggccaaagaaggcg

SEQ ID NO: 251592 - RNA, 78 nt, Homo sapiens
cccacaccaaccaagcccgaccggcaccgccaccggacaaacggacaccggggcgcgagacagggacgccaacagccc

SEQ ID NO: 251593 - RNA, 77 nt, Homo sapiens
agaaacgcgaaaagccgcaaaaaaacgaaacagggccgacaggcacagacagcaaaccagaaagcaaaaaaggagcc

SEQ ID NO: 251594 - RNA, 54 nt, Homo sapiens
cccacagccacgggaccggcgcaggccaagaaaccagcaccagaaagccccggg

SEQ ID NO: 251595 - RNA, 83 nt, Homo sapiens
aaggacaagaggcagcggcggcgagagcagaccgaggaccagaggcgagcggcgcagcgcaggagaggaagacgacagccggc

SEQ ID NO: 251596 - RNA, 77 nt, Homo sapiens
gaacccaaaagggcgagccacccagggaacgggggcgaccaggccgaaaggacagaggcgagaagaaagccaaggca

SEQ ID NO: 251597 - RNA, 67 nt, Homo sapiens
aaacaccgagcacacaggaccagaacagcgcaggagcacagagcacaggggaaaggggcaagaagag

SEQ ID NO: 251598 - RNA, 80 nt, Homo sapiens
cgacacaccagccgacgcagcggaagcggacgccccaagcccgggccgcaccacagagagaagagacgaggaggagggga

SEQ ID NO: 251599 - RNA, 83 nt, Homo sapiens
ggacccagcgccggcccccaggcgaagaagcgcagccgcaccggccaaggagaggagcgggaaggccccgcacccggagaccg

SEQ ID NO: 251600 - RNA, 72 nt, Homo sapiens
aggccccggaggaaacaacaagacagagcccgggaagcgcagagggaacacggccacgaggggaacgggaca

SEQ ID NO: 251601 - RNA, 63 nt, Homo sapiens
gagaagaaaagaagccaggcaaagaagaaaggccacacccgggcagaggcccacaagcggcac

SEQ ID NO: 251602 - RNA, 70 nt, Homo sapiens
gcaaacccaaggcccaaaacccacagaaggaagagagacagagaagacgcagggcgccaacggggagaag

SEQ ID NO: 251603 - RNA, 63 nt, Homo sapiens
gaccaccccaagcgccacacggcgacagcgggcagcgggggcagagacggggaacagggccac

SEQ ID NO: 251604 - RNA, 75 nt, Homo sapiens
gcggggaccgcggcccgggaagagggcaggagacggccgacccgcccggcaccggcccaggcgcagcggacccag

SEQ ID NO: 251605 - RNA, 77 nt, Homo sapiens
gccccgacgacagcgggccgggaaaagggcacgaggccggaaccgcccagccccgggcggagaacggaaaagcacca

SEQ ID NO: 251606 - RNA, 73 nt, Homo sapiens
aaaacagaccgaagccaacaaagaagcggaaagcagaggaccgacacccagaaagcagagaaaggaaaaccag

SEQ ID NO: 251607 - RNA, 77 nt, Homo sapiens
agaaaacacgccaacgccgcccaagagagcaagaccgggcccacgagcgcggaaaaggaacagaagaggaaccgaaa

SEQ ID NO: 251608 - RNA, 75 nt, Homo sapiens
cggaaaggcccgcggcgaggagcgagcagaggcgcggccgaacccagcgagaaaccaggaaccaccccgggagcc

SEQ ID NO: 251609 - RNA, 66 nt, Homo sapiens
gaaaggaacagaggcaacacagcaacccgcgacagaccgcaacccaccaaggagcacaggacgaag

SEQ ID NO: 251610 - RNA, 70 nt, Homo sapiens
gacgaccaccgagggcaggccgaaccaggcgcaagccacaggccagcgcacgcggggagacaccgcgcca

SEQ ID NO: 251611 - RNA, 75 nt, Homo sapiens
cgacgagcgcaaggagaggagacgaccagaaaaccccaaagagagggaccaagggaaagaaagcaaagagaaaag

SEQ ID NO: 251612 - RNA, 79 nt, Homo sapiens
ggccggccagccgaagaggggcggcacccccgaaacgaaggaggcccaaccacaaaaggagccgacggaacccagacgg

SEQ ID NO: 251613 - RNA, 85 nt, Homo sapiens
agaagaaacgcaccggaaaggccaccaggggaggagaagacaagcagacccaccgaagaccgcgcaggagcagcaaagacacaag

SEQ ID NO: 251614 - RNA, 76 nt, Homo sapiens
cgagggcggcgcgggagcagcacccacagccaaggcgggagccacgacgagccagagaggcaccaacacaagagac

SEQ ID NO: 251615 - RNA, 50 nt, Homo sapiens
gaccccggagcccagaagacagagggcgagaggaagcaccaaccgccccc

SEQ ID NO: 251616 - RNA, 75 nt, Homo sapiens
gagaccgccaccccccgcgggggggagaggccccagggagcgcccacaagccacggaaaaaggacagaaaaagag

SEQ ID NO: 251617 - RNA, 73 nt, Homo sapiens
aggaacggacccagcagaaaagaagcgggcaacccagcgcaggagggcacggagaacagcggcagcgaaacag

SEQ ID NO: 251618 - RNA, 79 nt, Homo sapiens
accgcaaggaggggacacagcgaccacgacggagaagcagggccaaggcgccgcgcccggggagacagaaacgaggcgc

SEQ ID NO: 251619 - RNA, 74 nt, Homo sapiens
ccaacggggaaagggaagaaacccaaaagacccaaagcggaaaacccgcaagggccagcaaaaccgcaagcaga

SEQ ID NO: 251620 - RNA, 51 nt, Homo sapiens
agacgagcacagagaacgagacccagagcagaagcggacaggacggcagac

SEQ ID NO: 251621 - RNA, 79 nt, Homo sapiens
cgaagcaagaaaccaacgagacgccaagaaaacagggaacgggaccaaaggcaacccccgaccagaaaacccagagccc

SEQ ID NO: 251622 - RNA, 85 nt, Homo sapiens
ggagcagagagagcgacaacacgcgaacggcgaggcccagcaaaaaccaaagagccccccaggcacagagcgcggacgacgggcg

SEQ ID NO: 251623 - RNA, 75 nt, Homo sapiens
gcgccgaacggggcaacagccgcagaccggaccagggagcgcgcgcaggcgggccaccccaagaacaacagagcg

SEQ ID NO: 251624 - RNA, 77 nt, Homo sapiens
cgagaagaaaggccaggaaggcaccacgaggacacgaaaaccacaggacgagacccgacgaggcccgagcccaccac

SEQ ID NO: 251625 - RNA, 80 nt, Homo sapiens
caccagcaggaggggagagccaagcgccagcgacagcccaccacaggaggagcagggccagcgcagaaaacagggaagaa

SEQ ID NO: 251626 - RNA, 84 nt, Homo sapiens
cccggaaggaagagacagagacagagcaaaaccagggaccaagaaaggcccagggaccaaagcccggacaaggcccgagcacca

SEQ ID NO: 251627 - RNA, 74 nt, Homo sapiens
cagccacccccccaacccggaccaaagacagagacaagcggggaagaacggcggagcacaccgaccaaaaaaga

SEQ ID NO: 251628 - RNA, 83 nt, Homo sapiens
agcaagccgccgggacagccacgacgggacgaacagcggggacgccccagcagaccgcccaggagaggaaagcaggaggaaag

SEQ ID NO: 251629 - RNA, 83 nt, Homo sapiens
ccgaccgcagaagggagaccacagcaagacgccaggacccccagaagccagaaaggcagcacagcaccagaagcagcacgagc

SEQ ID NO: 251630 - RNA, 74 nt, Homo sapiens
ggagaaggcaagcccgcgaaggaggcagcggcggggcccgggacgaggcggacggggcagaagcccccggggag

SEQ ID NO: 251631 - RNA, 75 nt, Homo sapiens
accccaaaacaccggaaaccccagccgggaggggagcgggaggaggccgccacagaggagccgccgcggaccacc

SEQ ID NO: 251632 - RNA, 77 nt, Homo sapiens
ccgcagcagcgggaggagcagggacaccagccaggagagaaccagaccgggcggagacaagccagccggacgacagc

SEQ ID NO: 251633 - RNA, 56 nt, Homo sapiens
accccagaacaccgaaaaggaaaccccaaagggagcacgcgccaagggcacacgca

SEQ ID NO: 251634 - RNA, 66 nt, Homo sapiens
cagcaaagggaaacaagcaaacagacccaagcagggcccaggccgccacagcgagagacaacagaa

SEQ ID NO: 251635 - RNA, 59 nt, Homo sapiens
cggcggagcggcggaagaagggacaccgagaagaaagggcaaaaaagcgaggacccacg

SEQ ID NO: 251636 - RNA, 78 nt, Homo sapiens
ggaagccacaaagcaaaacggcacgggagagaacccgggcaggaagggagggcgagaccccgaacagacgaggggaga

SEQ ID NO: 251637 - RNA, 78 nt, Homo sapiens
ggaggggggagcacaggccggcggggggcggacaccagccaagcagcggaacgacagaggcggaggcagggcgcaacc

SEQ ID NO: 251638 - RNA, 76 nt, Homo sapiens
gcggggcggcccaccaacaggaacagggcagacgagcggaggacacccaacccgggcgcacgggacggcagcgcgg

SEQ ID NO: 251639 - RNA, 91 nt, Homo sapiens
ggacaagcggaccccggcccaggcggcccgagaaaagcaggagaagcgggaaaagaggcggaccacacggggagcaccgagagagaaagag

SEQ ID NO: 251640 - RNA, 73 nt, Homo sapiens
cgggacggaggacgcgcaggacccaaagacaggaccacgcaccagcagagaaggaaagcaaaccgaagcaggc

SEQ ID NO: 251641 - RNA, 77 nt, Homo sapiens
cggggcgagggaaccaggcgaggagccgccgggggccggcaaggaaacccaaccccaggcacaagacacagaagcac

SEQ ID NO: 251642 - RNA, 56 nt, Homo sapiens
ggaaaggcggagccaccggccggcgaagacaaggccgacgcgcacgaacacggggg

SEQ ID NO: 251643 - RNA, 76 nt, Homo sapiens
aaaggagacaaaggaacggaggaaggggacagggaccacaacaaggccgcgagggaaggagcacaaaggcacccac

SEQ ID NO: 251644 - RNA, 77 nt, Homo sapiens
gagggcccgcgccacccgcccacgccacaaaggcacacggggggccaagaccgaggccggcagaaccccaaagaggc

SEQ ID NO: 251645 - RNA, 55 nt, Homo sapiens
agcaggacgaaaggaacccgggaaggggcacgaagaccaaccggccaaagaagag

SEQ ID NO: 251646 - RNA, 79 nt, Homo sapiens
caggccagcacccagaaaaagcaccccgaggaggaagacgaacgaaacacgaaagggcaggcgaagacgccgcccacgc

SEQ ID NO: 251647 - RNA, 73 nt, Homo sapiens
cgcagggggagaacgaaggaagaaaacggggcgcaccagggagcaccagagccaaggcgcaccggcgcccaga

SEQ ID NO: 251648 - RNA, 78 nt, Homo sapiens
gcacccccgggggggggcaccagccgcgaagagcaagcagagggcccaaccgccgcgacaaagacggccagcaccacc

SEQ ID NO: 251649 - RNA, 79 nt, Homo sapiens
gaccagccaggggaaacccggagggaaccaagaacccgagccaggcgccacaccaagaaggacagaagagacgggccca

SEQ ID NO: 251650 - RNA, 72 nt, Homo sapiens
cacgaagaagccacagccgcacggacccccagagccaagaaagggagggggaaacagccaaggccgaggaga

SEQ ID NO: 251651 - RNA, 79 nt, Homo sapiens
accaacacggaaaaccgacccaaaaagaaaacaccgaagggcggacgaaagaaagaaggagcaccaacgcaaagaaaaa

SEQ ID NO: 251652 - RNA, 79 nt, Homo sapiens
aaaaccgaggcaccaagccggccagcaagacccgagcccaaacagaagacgggagacccggccacccccaagcggcacc

SEQ ID NO: 251653 - RNA, 102 nt, Homo sapiens
gccgggccgggcaagacggcgaagcgcgcgccgcgcccggaccccagcggagccggagcgaggcgggggaggcagcagaagcccgcccccgagagcgacccc

SEQ ID NO: 251654 - RNA, 72 nt, Homo sapiens
gcgccccaacggaagagacccgcaggcggacaaggacaccgcgaaaggcagcaccacagcaccacaggacaa

SEQ ID NO: 251655 - RNA, 71 nt, Homo sapiens
agggaggcggaagaaggaaccccgaagagaacccgaagagcccaagcagccaagaaaaaggcaaaaaaaaa

SEQ ID NO: 251656 - RNA, 82 nt, Homo sapiens
gagcgcgcagcggccggggaacgcgcgcgcgcggacgcggcgccccggggcagagcggcgggaaaccaccaacaacaccccc

SEQ ID NO: 251657 - RNA, 80 nt, Homo sapiens
gacaggaacagggaccacggggcacccaagaaaacccaggccgcgaaggagaagaccggacaccaaccgacggccgccag

SEQ ID NO: 251658 - RNA, 55 nt, Homo sapiens
gcgcgcagcccacaccgagcagcagccaaggcagccggcacccgcacaacccagg

SEQ ID NO: 251659 - RNA, 84 nt, Homo sapiens
accaccgcacccgccagcgagcccgggcacccgcggaccaggccaaacgaccaagaaagcgggacgcggaaaacgggacccgca

SEQ ID NO: 251660 - RNA, 63 nt, Homo sapiens
ggcagccgagcaccgagccagcccaggaaaaggagaggcaggcgggaagaacagggccaggcc

SEQ ID NO: 251661 - RNA, 77 nt, Homo sapiens
ccccacaccaaccagaacaaaacagacccagggaggaggaggagaggaaaaagcccaccgcaccagccaagacagac

SEQ ID NO: 251662 - RNA, 68 nt, Homo sapiens
ggagggcgccccagggacagcaacagcggccgggaacgaccgaaacaccaggaggggcgcaaaacgag

SEQ ID NO: 251663 - RNA, 36 nt, Homo sapiens
ccagacacagaacaaggacaggccaaacggccggag

SEQ ID NO: 251664 - RNA, 58 nt, Homo sapiens
gggccgggccccagcacggccgcaccggggaagcgaggaggagggccgccgaccagca

SEQ ID NO: 251665 - RNA, 47 nt, Homo sapiens
aaacaagagccccaaagcagccaaaagacgggacaaggaggacaacc

SEQ ID NO: 251666 - RNA, 83 nt, Homo sapiens
caccgcgagccgcgccacgggcggccccccccgcgggcgagccgggggaagacaggcacagccagagaacaacacacacacac

SEQ ID NO: 251667 - RNA, 74 nt, Homo sapiens
cagcccgcgcggggcgcgggcgcggccggaccgcagccgcaagggagaaaccggaggccaggagggacaggggc

SEQ ID NO: 251668 - RNA, 72 nt, Homo sapiens
ggaccgggaagccgcaacccaacccaacaggcagcaggaaaacagagaaagagacagcgacgcaacaggagc

SEQ ID NO: 251669 - RNA, 81 nt, Homo sapiens
ccgaggacacaccgcggacaggaagacgagacgccccccggagccccaggccggaagcgcgggcccgcaccgggcaacaac

SEQ ID NO: 251670 - RNA, 36 nt, Homo sapiens
ggcggaggaacagcgggggcacaacaacacggagcc

SEQ ID NO: 251671 - RNA, 91 nt, Homo sapiens
caggagaccgagcgcaagggcggcaagcgaaagcacacagaggagaacaggcaaaacagacgccagcagagaaagcagccaaccagagagc

SEQ ID NO: 251672 - RNA, 78 nt, Homo sapiens
caagccgaaggaaaggcagaacgccgaacaggagcaacagagagaagaaaaggggagcagaacagaagaacaagaacc

SEQ ID NO: 251673 - RNA, 72 nt, Homo sapiens
ggcgacggaccacagcaggggggcggggagagcccgaccagagaaaaggcggaagaccgccaaaaaggacac

SEQ ID NO: 251674 - RNA, 75 nt, Homo sapiens
gagacagcaaccggccacgaggaggggagcacagcaagcgggagcaggcagaccaaaggaacagaagccagggcc

SEQ ID NO: 251675 - RNA, 68 nt, Homo sapiens
acaagggccccgagaagcaagcccgcacacggcggcggccggcggacaaagagccgccgcacccaggc

SEQ ID NO: 251676 - RNA, 51 nt, Homo sapiens
cggggccaaacacgagcaggccaccgggagcaggagagggccagaagacaa

SEQ ID NO: 251677 - RNA, 57 nt, Homo sapiens
gaacccccacgcggccagcgaaaacgcccaggaaacaaagccagaccgccgaggggg

SEQ ID NO: 251678 - RNA, 78 nt, Homo sapiens
cacccgaacgggaaacacacacacaaaaaacccacacaggacgcggacaagggcggcaggcgccggaccgaaggcgcg

SEQ ID NO: 251679 - RNA, 80 nt, Homo sapiens
gacaacaccgagagagaagaagacagcgagaagccacgcccaggaagaaaggaccccagaccgagaggggggaaacaccc

SEQ ID NO: 251680 - RNA, 54 nt, Homo sapiens
gcccggacacgacgggagcacacaggagaaagcagacgcaaggggcgaaggagg

SEQ ID NO: 251681 - RNA, 67 nt, Homo sapiens
gcccagaccgagcaccaaggacgaggcacgccccaccggaggaagcaaaaaaagcaggaaaggagaa

SEQ ID NO: 251682 - RNA, 79 nt, Homo sapiens
cgggcagccaagagacaaaacccagagagggaccgaaagagaggaaacggggacagaagaacgaagaacaaggacaagg

SEQ ID NO: 251683 - RNA, 55 nt, Homo sapiens
gggagcgacgcccccagggcaggcggcaggaacaaacaggcaggacgggagaggc

SEQ ID NO: 251684 - RNA, 77 nt, Homo sapiens
gagcccccgagaggaggcagacccccacaagacgacacccgacgagcaggggagcagcaagccgggaaacagcgcgc

SEQ ID NO: 251685 - RNA, 74 nt, Homo sapiens
cgaagcagcgcagaaggagaccaaaagaaggaaaacgacagaccaaagagcaacccagcaaggcccaagcagac

SEQ ID NO: 251686 - RNA, 67 nt, Homo sapiens
cgaaaagagccacggggccaagaaggccagcgagcccgcccaccagccgaaccccccagaaaccggc

SEQ ID NO: 251687 - RNA, 66 nt, Homo sapiens
ccgagcggaggaggaggaggaggcgaggaggagagacaccgggaacaccaccaggagggccggccg

SEQ ID NO: 251688 - RNA, 71 nt, Homo sapiens
gcaacccacgacccaacaccacagacagccgccaggaagcaacgcagcgcggaaaggcacaaccaaggaca

SEQ ID NO: 251689 - RNA, 79 nt, Homo sapiens
gcccagaacagaaccacacccaggacaacccaaagaccacaggagggaaaagaagaccgaagggaacacacacaaaaaa

SEQ ID NO: 251690 - RNA, 83 nt, Homo sapiens
gaaacaggcggaccacacgaagagccccggcacaaaggaagaagaaagaagggagcaagagcaaaaaagaagaggagaggaga

SEQ ID NO: 251691 - RNA, 117 nt, Homo sapiens
gcccacgcccccggccccgcgcggaggggcgggggaggcgccgggaagcgacggcgccggcggcccgagaagaggggcaaggccaggcccgagagacagaggcagccgggggcaagc

SEQ ID NO: 251692 - RNA, 55 nt, Homo sapiens
cagcaagaaagaccacaagaccagggagacgcgccacgcccccaaggacaccccg

SEQ ID NO: 251693 - RNA, 81 nt, Homo sapiens
cgccagcggcgcaggcccagagcgcgcgagcggaccaggagggcacccccgggacgcgagaagaagaaaagaagagagcga

SEQ ID NO: 251694 - RNA, 52 nt, Homo sapiens
gggaggccgcacggcccacgcgaagccaacacccgaagcgaagggcggacag

SEQ ID NO: 251695 - RNA, 79 nt, Homo sapiens
gcacggagcgggcccgggccagaggcagaaaacggacggaagaaaaggcggccggcaaccagccagagggcaccggcaa

SEQ ID NO: 251696 - RNA, 43 nt, Homo sapiens
cggaagaccggcccagaccccgagacagacaagcacacagagg

SEQ ID NO: 251697 - RNA, 76 nt, Homo sapiens
cgccgaaggagcgaccacagacggaccccagcccggcacaaacaggaaggacagccagcccagccccagagaccgg

SEQ ID NO: 251698 - RNA, 79 nt, Homo sapiens
gcacggcggacaagcagggcaaccaacgccggggcggggagcacggaacgacagggcgcagggcagagcggcgggaaac

SEQ ID NO: 251699 - RNA, 80 nt, Homo sapiens
gcaaggaggggaggcgagaacacgaggaggcaagacagccgccacccaacgcaagggaggcagaaaggccccgcacgcca

SEQ ID NO: 251700 - RNA, 73 nt, Homo sapiens
ggccaaaagagaagaacccaaaacacacaccagcccgcgagcgcacgccagcgccgcccggcacacaaccaga

SEQ ID NO: 251701 - RNA, 79 nt, Homo sapiens
gcgaccgcgggcggaaggacagcgcggacaaccgggccccagcccagaccagccagaggacaagaaagaaggagggaga

SEQ ID NO: 251702 - RNA, 81 nt, Homo sapiens
ccgaacgccgccggaccccgggaggcgaggacggccgccagaaaagcaggacgggcgccaacccccaacccacgcgggcag

SEQ ID NO: 251703 - RNA, 59 nt, Homo sapiens
ggcacaacggggccgcgagcccgagccgaggccgagacgccagaggccggggcagcaga

SEQ ID NO: 251704 - RNA, 66 nt, Homo sapiens
gggcgagcacccgagagcaccagaagcaccggaggcccacaccagccccagcggccggcggagaga

SEQ ID NO: 251705 - RNA, 83 nt, Homo sapiens
gagacccgggcagcgcccaccgcggagcgggaccccaggggaagaaaaggagggggagcgcgggaggggacccccggcgagaa

SEQ ID NO: 251706 - RNA, 85 nt, Homo sapiens
acccggccccggcccacaggggggggcaaacccgagagaacggggaggaacacggccaaccacaaagaacaacacagaagcgaag

SEQ ID NO: 251707 - RNA, 56 nt, Homo sapiens
ccccacagcaagcacccccagccccaaacacagacacaaggagcacggacagcggc

SEQ ID NO: 251708 - RNA, 73 nt, Homo sapiens
cgcgcgcaaccccaagagcggagacacggggaaacgcagggagaagaaccaacaacggaaaaccagcgggaca

SEQ ID NO: 251709 - RNA, 74 nt, Homo sapiens
gaggcgcagcggggccaggaggaaaaaagccaggggccagcggcgcagcggagaacagagaggaccccaaacgg

SEQ ID NO: 251710 - RNA, 73 nt, Homo sapiens
ggcacaaagcccgacagggcaacacccgacaaaggggaaccaagaccaggacaaagaagacccggagagacaa

SEQ ID NO: 251711 - RNA, 83 nt, Homo sapiens
gcgcaggacgccacagcaagaggaccccaccgaaagaccacagcaagaccacgcccccagccgggggaccaggccgaacgacc

SEQ ID NO: 251712 - RNA, 75 nt, Homo sapiens
acccccccccccacccaccaaaccggagggggaaaaaacccaaggcgcaaagggcccacgagcagcgagcgcccc

SEQ ID NO: 251713 - RNA, 72 nt, Homo sapiens
gagccacgccccacgaccgccagggagaaaccggaaaccgacaaggcaacagggcccagcgcacaacccagc

SEQ ID NO: 251714 - RNA, 78 nt, Homo sapiens
ccgccccagggcgaaccagagagaagagacaggaagaagagagcggaacagcagagcgcacaaagacgaggccacagg

SEQ ID NO: 251715 - RNA, 81 nt, Homo sapiens
aaaagcggagaagaggagcgaaaacgccacaacagagggggccagggcggggaagacaaacagaacaacgggcaacccgaa

SEQ ID NO: 251716 - RNA, 75 nt, Homo sapiens
gagagggcaagggacccggccagcgacgcaccgagaaaggaaggaaaaccgacgagagggaggcggagagacgcc

SEQ ID NO: 251717 - RNA, 70 nt, Homo sapiens
gcacagaaaaaaagaacaaggcaccaaagacgagaaagacagaccagaacagagggagcaacaggacaga

SEQ ID NO: 251718 - RNA, 87 nt, Homo sapiens
acaccaccgcggcgcgggagacgagccggccgcccgggccgggggacccgcccgccaggccaccaaggaaaaccagagacccagaca

SEQ ID NO: 251719 - RNA, 75 nt, Homo sapiens
cgcagcaagccgccccagagaacgacgcacgacaaggagggcggaacggcggaagaaagcggacgccggaagcgg

SEQ ID NO: 251720 - RNA, 76 nt, Homo sapiens
acggggacgggaaccccgagagaagaggcccaagaaacagaacaagaaaaagaagaggaaaggacaggaggacagg

SEQ ID NO: 251721 - RNA, 79 nt, Homo sapiens
aggcggacggcgggaccacaagacaacgcggagcggcgaagagcaaccaggaagcgaagggaagaggccagggcgcagc

SEQ ID NO: 251722 - RNA, 78 nt, Homo sapiens
ccggaggaaccgccggcaaacgccgcccccggccacgacccccgaagagccgcgccgccagggcaccacagagggaga

SEQ ID NO: 251723 - RNA, 70 nt, Homo sapiens
ccaggaggaggaggcagaggaggcaggggaagcacaaaagcgcacccgcgccagcgaggaccggaacggg

SEQ ID NO: 251724 - RNA, 66 nt, Homo sapiens
aggaaaacaggaaagaccgaccaggacacgagcgggaacgcaaacgaaggaccccgcgcccaccca

SEQ ID NO: 251725 - RNA, 69 nt, Homo sapiens
gccgcgcgcggcgccaccggcacaccgagggcagcagaagagcgcaggaccgacacacagcacaagcca

SEQ ID NO: 251726 - RNA, 70 nt, Homo sapiens
aagcgcccggccggaggcaggggaaagggggggaagaggagaaggcgcgacagacccaccacgccccaac

SEQ ID NO: 251727 - RNA, 84 nt, Homo sapiens
ggagcgccgcgcccccaccaggcaaaagcagaccggaaaacccaccggcaagaccacacccgaggggagcccaggacaccacga

SEQ ID NO: 251728 - RNA, 73 nt, Homo sapiens
aagaaaagggaggaacacacgaggcccacgacccaaggccgccaagacccagaagacaccccgggcggcgccc

SEQ ID NO: 251729 - RNA, 71 nt, Homo sapiens
cccggcgccgcgccggcggcgaaacagacaacacacgaacccccaaaccggaaggccacggacaggaggcc

SEQ ID NO: 251730 - RNA, 55 nt, Homo sapiens
cacaacccgacccgacgaccagagaaagagcacacgcaaagcacgagaacagacg

SEQ ID NO: 251731 - RNA, 60 nt, Homo sapiens
cgccgggcacagccggaaagcaggaccgcgacggcagcagagcaaacagagagaagggcg

SEQ ID NO: 251732 - RNA, 85 nt, Homo sapiens
ccgcgcccggggccaggacgccaccgagcgggagcgcacccgaacacccacaaagggacaggacaagcccggggggccagacggg

SEQ ID NO: 251733 - RNA, 70 nt, Homo sapiens
ggccaggcagggagcagggaccagcgacgcacccagacagcagcccccagggacccaaggacgaccacag

SEQ ID NO: 251734 - RNA, 57 nt, Homo sapiens
gacagaaaaaccaaccgggaaaaaacacagaaaccacgagcggggagaaacagcaag

SEQ ID NO: 251735 - RNA, 70 nt, Homo sapiens
gggacaggaggccccgcaggaccgcacccgcggagacggacgcccgcccggagcgagagcgagagaaggg

SEQ ID NO: 251736 - RNA, 35 nt, Homo sapiens
ccggcgcaaggagaggcagagagcaagaggcgaag

SEQ ID NO: 251737 - RNA, 73 nt, Homo sapiens
gggaccgaaccacgggcaaggagacagcaccgacgaaaggaaggacccagaccaggaacagaaggccgcaagc

SEQ ID NO: 251738 - RNA, 63 nt, Homo sapiens
ggcgcgagagcgggaagaggcggcagacagcgggacaagcagaccggaagaccgacggaagac

SEQ ID NO: 251739 - RNA, 57 nt, Homo sapiens
aggagagccgaaagcccgcagcggaaacaagaccccagggaccgaaacccgccacac

SEQ ID NO: 251740 - RNA, 66 nt, Homo sapiens
ggcagagagcagcgagaaaccagaaaacacggaacaaaggagcagaagacagagggaggagggcca

SEQ ID NO: 251741 - RNA, 55 nt, Homo sapiens
gacagcgagcgaggacgaggaacggcggaggcgcgaggcccgccgagcagcgaca

SEQ ID NO: 251742 - RNA, 82 nt, Homo sapiens
aaccgggcgcccggacgggggcaagcggaagggagcccaagaggaccagaacccaggagaaacgagagggacagcaaggaag

SEQ ID NO: 251743 - RNA, 68 nt, Homo sapiens
aggcggaagaaggaaccccgaagagggcaaggccagagaaggcgggagaaagacacgaaccacagaac

SEQ ID NO: 251744 - RNA, 64 nt, Homo sapiens
cgccgccgaccgccgcccgccacacccgccgccagaacgaagcgcgcggcaggcgcgcgccgcc

SEQ ID NO: 251745 - RNA, 76 nt, Homo sapiens
accaggggaggcgacaagaacaccagaagagaagcccccccagaaccgccccccagagagacccaggagaagaggg

SEQ ID NO: 251746 - RNA, 81 nt, Homo sapiens
caggccgcagccgccggggcagcgcagacccaggggagcccaccagccagcaacaggcccggaagacagccaagcggcaga

SEQ ID NO: 251747 - RNA, 75 nt, Homo sapiens
gcgagagcaccgaagacggcaagcacggccacgccaaggcccagcagaggggagaggacggggagagcaacgcca

SEQ ID NO: 251748 - RNA, 79 nt, Homo sapiens
cacagccacaccagccaaaggaggccagacaccagaaagaaccaaggcgacagggggcaccacagggaacagaacggcg

SEQ ID NO: 251749 - RNA, 85 nt, Homo sapiens
acacccccaccgcccaggcaacaaaggcccaggacgagcaccaccggaaggaaggcgagggacgggacaacccgcagaggcaggg

SEQ ID NO: 251750 - RNA, 73 nt, Homo sapiens
ggcccagcaccccgagaaccgcaggagccagagacaacccagaaaagaaaaggccaggggcgccgaaaaaccc

SEQ ID NO: 251751 - RNA, 72 nt, Homo sapiens
aagaagcaacaaggcaagaaaaaggaaccgaagaacaaagaagcaacacagccacagcacaacagcaccaac

SEQ ID NO: 251752 - RNA, 68 nt, Homo sapiens
gaacccacgcaagcaggggcacacggcgcgaacccacaaggaggggggggccccggaggacaaacccc

SEQ ID NO: 251753 - RNA, 78 nt, Homo sapiens
aacagaagagaagcacaaacaagaaagggaaaaccgaaacagaagcacacccacagagaaaccgcagaaggaaaagcc

SEQ ID NO: 251754 - RNA, 49 nt, Homo sapiens
caagcggagaacaaacccgcccaaccgagcaagaacagccgcgcgacgg

SEQ ID NO: 251755 - RNA, 59 nt, Homo sapiens
acggcccggaaacaggaggacgaaggcccgccgaaggagaagggcaggaagacccagca

SEQ ID NO: 251756 - RNA, 73 nt, Homo sapiens
gacaccgggcagggcagagcacccgacgcacacagcaggccgcccgcagcagccaacggaaggagaaacaaca

SEQ ID NO: 251757 - RNA, 85 nt, Homo sapiens
ccggaggcggcggcggcgagcggccggggcagcagaagaagaaggagaaggagagaaggaagcgaggcgaagaaaaggcggacgg

SEQ ID NO: 251758 - RNA, 51 nt, Homo sapiens
aaaagcaaggccaccaacaagagcaacccaggggggaaccacaaagaacgg

SEQ ID NO: 251759 - RNA, 72 nt, Homo sapiens
gagcggagggccccccgagccaacggcaagaacaagccaagacccagagaaccagcgaggagagaggaacaa

SEQ ID NO: 251760 - RNA, 69 nt, Homo sapiens
agaggggaggcagcagcaccaaacaggggacaaggaaggcaaaccgcgaaggccgagcgagggaacgac

SEQ ID NO: 251761 - RNA, 74 nt, Homo sapiens
agcaaacccacccagcacaccccgcgaaaggaggaggcacagagcaggccagggccaggaaccccagagccggg

SEQ ID NO: 251762 - RNA, 92 nt, Homo sapiens
gcgagcaagggcaaggacacggggaaaagacagacagcgcgggcgcaccgcccccccgcagcagggccaggcacccgccggccggcaggcac

SEQ ID NO: 251763 - RNA, 68 nt, Homo sapiens
cccgagcaggaggacgaacagggggacaggagccaggccaagagaaagaaacacagaagcgagcacca

SEQ ID NO: 251764 - RNA, 83 nt, Homo sapiens
agcgcaggcacaaccggcagccaagccaccgaccaaccaaacaggacaagcgggggccccagggcgccgagggccaggcgcca

SEQ ID NO: 251765 - RNA, 75 nt, Homo sapiens
acggcggcagcagcggcacaggacagaccaaaaagaagcaaaaccacgccagaaccgcaaagaagaacaccaaga

SEQ ID NO: 251766 - RNA, 75 nt, Homo sapiens
gcggcagcaggaggaggggccaacaagacggggagccgagagcgaaaagcgagaaagaccccggacaggacaggc

SEQ ID NO: 251767 - RNA, 82 nt, Homo sapiens
acggccggacccagcaccggcccggcccgcgaacgcgagcacgcgcggaaacccaaaggaacgccagacccgggagggagaa

SEQ ID NO: 251768 - RNA, 77 nt, Homo sapiens
cggccccggagcccgcgcccgggcggccgccgggagacaagcgacagagaagaagagaaccgcacgcacaggaaccc

SEQ ID NO: 251769 - RNA, 77 nt, Homo sapiens
gccccccccgccccacgcgggcccgggggcccgcgcagcgcggcagagcacaggcggaggcagcggaggccccgccg

SEQ ID NO: 251770 - RNA, 72 nt, Homo sapiens
accaacagccccaacccagaaagcagaggccagagcggagacagacgcaacacagaaggagaaaaagacaga

SEQ ID NO: 251771 - RNA, 71 nt, Homo sapiens
aaagccagccaggacagcgggaggagaagcgaagacccggaacagcggcccggcacccagcgacgcggaca

SEQ ID NO: 251772 - RNA, 66 nt, Homo sapiens
cggagacagacaagacaagaccggcggggaagcgagggaggaagaaggagaccagagaaagaggcc

SEQ ID NO: 251773 - RNA, 78 nt, Homo sapiens
gcggcaggcagcccgcaggggccgagggccaccgcgcagcagacgccccgaacaccagagcacccggcccaggcggag

SEQ ID NO: 251774 - RNA, 57 nt, Homo sapiens
aagacagcgccgaccagacaaaaaaagggcgaagccaagacaagaagcggagaagcg

SEQ ID NO: 251775 - RNA, 70 nt, Homo sapiens
gagacggaagccggacccgaccgggccgaggacacacgaccgagcacgggccccaagcaaacgaggccgg

SEQ ID NO: 251776 - RNA, 66 nt, Homo sapiens
aacagcccgacaaccaggcaaagacgaacagaacaacagagaagcgccaagaagggaagagaggag

SEQ ID NO: 251777 - RNA, 82 nt, Homo sapiens
agacccagccagaccagggacaaagagcaaacagacagggccgcagggcggagaacggaaaagcaccaggaagcagagagga

SEQ ID NO: 251778 - RNA, 51 nt, Homo sapiens
acgcagggcgcccccggcacgacagcagagcaagagcgccagacacagcca

SEQ ID NO: 251779 - RNA, 36 nt, Homo sapiens
gggaagagggccacggggggacgaagggaacccgcc

SEQ ID NO: 251780 - RNA, 80 nt, Homo sapiens
gggccagccggcaacacgccaagaaggagcggaacacgaccaggcgccagcccgacaacacagcccccacaaaacaagga

SEQ ID NO: 251781 - RNA, 79 nt, Homo sapiens
gccccacggagaaggcagagagcagagacacccgacggggaaagagcacaggagcacgggagcaggggcagacacggga

SEQ ID NO: 251782 - RNA, 70 nt, Homo sapiens
gaacacacgaccggccgggcgccgagacagagcggagcacccaccacagagagcagaccgccaagcccac

SEQ ID NO: 251783 - RNA, 83 nt, Homo sapiens
aagacggggcccgggaccacaggccccggcccagagagacggcgaagaacagaggaacaacgccaacgacaagacgaggacca

SEQ ID NO: 251784 - RNA, 75 nt, Homo sapiens
cccggcaagcggaggccgacacgacaagaagcgaaggagcccagggccagagggggcgaccgggacaaacggcgg

SEQ ID NO: 251785 - RNA, 79 nt, Homo sapiens
caaggccgagagccggaacaaacgagggcccgggaggaccgacgcagccagacaacaggcacaaagagagaaggaacac

SEQ ID NO: 251786 - RNA, 41 nt, Homo sapiens
agaaacaagaaagcacaaccccaagagacagggccaccagg

SEQ ID NO: 251787 - RNA, 82 nt, Homo sapiens
gaacaggaccacggagagaccaaagagaacacagaccagcggaccaccacaggaaaaagcgcagggccagccgaacccagca

SEQ ID NO: 251788 - RNA, 84 nt, Homo sapiens
agacaggaccagggaggagcaggaaagagaagggaagcaagaacgcgggaggagacagaccaagccacgccagaagccggacag

SEQ ID NO: 251789 - RNA, 82 nt, Homo sapiens
aaaccaggagggaaaacccacggggggggccccagaagaaaaaagagcaagaccggccagagccaccaaagaacaacaagag

SEQ ID NO: 251790 - RNA, 83 nt, Homo sapiens
caaggggcagggagaagggcaaggaccacaaaggaccgccacagcagccgggcccgccgggagcacaggcccacgacgagggc

SEQ ID NO: 251791 - RNA, 73 nt, Homo sapiens
ccggcgcccggccccagagagcccggcaggacgaaaacggaaggccccaggaccggcacccggaagggacaac

SEQ ID NO: 251792 - RNA, 77 nt, Homo sapiens
ggacaaaacagaaccggcgggagaaacccgggccggcccaagagagagacacggaggggaaaaaacccacacgaggg

SEQ ID NO: 251793 - RNA, 87 nt, Homo sapiens
aggaacgcggacgcgcgcggcacacaacagagcgaggccgggaccaaagcggcaggagcaggccgaccggagagcagcagagggaag

SEQ ID NO: 251794 - RNA, 85 nt, Homo sapiens
cgccgcccggcgcgaccccaacccagccccaagaggaggcagagagccccgcgacgagagagacagagagaccacgccgagcgag

SEQ ID NO: 251795 - RNA, 78 nt, Homo sapiens
acagggaggagggagaacacagcaaccgaccagggggcaggaacggagaaaaacgagcccccgaccggaacagcagac

SEQ ID NO: 251796 - RNA, 103 nt, Homo sapiens
gggaagcggcaggcaaaaggaaaacaaaggcacaggagccacacgcgagaccgaggcacgggcaggcacagcagaccagaagcagcgaggggacaaaacggcc

SEQ ID NO: 251797 - RNA, 77 nt, Homo sapiens
ccgagggcacgaggacccccaggcacccggagggggaaggggagcgcggccacagacgcacaggcagagacacaagg

SEQ ID NO: 251798 - RNA, 89 nt, Homo sapiens
ggggagcgcagacggcgcccagcaacacagaagccgacaaggcgcaagcgaaaacagaccgcgagcccagagcccccagaaacccacaa

SEQ ID NO: 251799 - RNA, 90 nt, Homo sapiens
cccagaccaaaaaaaaaaaacaaccgaggggccgacccaagcacaccagaaaggaaagagagacagggggaccagacagaagaagaaaac

SEQ ID NO: 251800 - RNA, 79 nt, Homo sapiens
acagccgcgcgcgagggccggggcgggcgccgcgggacccccgggccagggcagcccgaggccggccgccgcgccccca

SEQ ID NO: 251801 - RNA, 83 nt, Homo sapiens
ggaggcggcagcgaagaagacgaaaaaaacccaggagacagaacagacagaaaaaacaacaagaaacccacaaccaagagaac

SEQ ID NO: 251802 - RNA, 82 nt, Homo sapiens
gggacgcagacggcgcacgcggggaaaggaacacaggcggaagaagaaaggagccacagagggggacggaaggggaagcgag

SEQ ID NO: 251803 - RNA, 84 nt, Homo sapiens
accgccaccaggcccggagccccccaccaggaaccacgccccgagcgcccggagacccaggagaccccaggccccgcccggcag

SEQ ID NO: 251804 - RNA, 78 nt, Homo sapiens
cggccgcgcggacgaaggagacgaaggaaagaccacagcaagaccacgcccccagccgggggaccaggccgaacgacc

SEQ ID NO: 251805 - RNA, 79 nt, Homo sapiens
aacgagggcgaaacgccacaagaacaagaaaggaagagaaggagaaggcaaccgcacgaaaaccggaacacagagcaac

SEQ ID NO: 251806 - RNA, 80 nt, Homo sapiens
caagcgagaaggagggccgacgccacaggccaacgaggaaccaaagggagaggaaaccacccaggcccaggaccgagccc

SEQ ID NO: 251807 - RNA, 83 nt, Homo sapiens
cgcgcagcggcggcgccgacgcacaagggcccagacgggcccgggacacccagacagagagagcgcacgaagaagggcggagg

SEQ ID NO: 251808 - RNA, 77 nt, Homo sapiens
ccggaaacaccagaccgcgcccaccaagaccacccaacagccggagacggaagcggaagcacacgccagacgccagc

SEQ ID NO: 251809 - RNA, 73 nt, Homo sapiens
agcgaaagcacaccaagggaaagacaaggagccgggccgagaaaccgaaccagagaccagagaagaaacgcaa

SEQ ID NO: 251810 - RNA, 102 nt, Homo sapiens
caggcggaggagacggcggcccgaggaggcagaaggaccgagccgacgcgggccgcgcggacgcaaacagcagacggaagaccccacggcaaaaccacaccc

SEQ ID NO: 251811 - RNA, 74 nt, Homo sapiens
accacgccgcgcccgcaagaacggccaagaaagcccgaaaaccaaggcacagaccaagacgccagaccaaaaga

SEQ ID NO: 251812 - RNA, 75 nt, Homo sapiens
gcgccgccggccgacggccggcgggcgggggccccgcgccgcggccgagcagcgggacagggcagggccgggagc

SEQ ID NO: 251813 - RNA, 37 nt, Homo sapiens
ccgggacgcacgcggagaagcagagacggggcaccgg

SEQ ID NO: 251814 - RNA, 122 nt, Homo sapiens
cacagacgccggacaaccacagcccggagagccgaccgggagaacacggggaaggagcggaacgcagagaacgccacgaggcccgaaggagagagccagagaggggaaggcaccgggcgacc

SEQ ID NO: 251815 - RNA, 80 nt, Homo sapiens
gcgggccccgggcacaccaacaagccacgaccggggagcagagcaagcccccaacaccagcaaccccgggggagacaagc

SEQ ID NO: 251816 - RNA, 78 nt, Homo sapiens
agcaccccccaaagccggagcggggcacggagcgagcagaggaggaggaaacccggaacacgcagaagaagcaagaca

SEQ ID NO: 251817 - RNA, 77 nt, Homo sapiens
aggaccaaacaaggccaaacggaggaaacccgagcaacccaggccagccagcacgccccaccggaggaagcaaaaaa

SEQ ID NO: 251818 - RNA, 78 nt, Homo sapiens
gccaagcagagaaacgacaagaaggcgggggcgcaacacacagagggagaaaacccccagcgaagaaccgagccccga

SEQ ID NO: 251819 - RNA, 82 nt, Homo sapiens
cagcgagccccagcaccagcaccccagggagcaacagcgagcaacaggcaacgaaaacagacaaaacaacggaaaagcaggg

SEQ ID NO: 251820 - RNA, 77 nt, Homo sapiens
aacgcaaaagaagagaagcagaaaaccagaagcacaaggacagagcacccaccacaggaggcacacgcagccagaag

SEQ ID NO: 251821 - RNA, 70 nt, Homo sapiens
ccccacgaacccaccgcgacccggccacgccgccccaagcaccgggaaccccaagaggaacagcagggaa

SEQ ID NO: 251822 - RNA, 62 nt, Homo sapiens
cgcacagcgaggggccaaggcagaagaaacggagaagggcaaaggaggccaggccagaggga

SEQ ID NO: 251823 - RNA, 69 nt, Homo sapiens
agcagcacgacccgaacccaggaggaaaggacgcaacggaaaggacaaggacaccaaggggacagggca

SEQ ID NO: 251824 - RNA, 89 nt, Homo sapiens
ggagaagcagggaaggaggccgagccgggaccaggcccgggggcggcggccacgccaaggacggacacacccgaagcagcccaccacgg

SEQ ID NO: 251825 - RNA, 73 nt, Homo sapiens
cacaagcacaagacagccagaagaaaacagagagagagcagccgaagaggacagagacgaggcgggcccaagg

SEQ ID NO: 251826 - RNA, 80 nt, Homo sapiens
cagggcgccgggagggcagacgcggccgcggcaccccgaacggggccccccgcgcgagaacccagcccgcgacacacaca

SEQ ID NO: 251827 - RNA, 83 nt, Homo sapiens
cggcggagcaaggaaaagagcccggaacgaagagacagagaggagacaaaaccccagccggagccgggaccaggaaggagcac

SEQ ID NO: 251828 - RNA, 75 nt, Homo sapiens
gaccagacggacccagcccaagagacccaccagagcgcccaggaggcggcagacaccaggggcccccgcgaagcc

SEQ ID NO: 251829 - RNA, 71 nt, Homo sapiens
ggggagagaggacacggcgggccgaccaaggaccccaaggaacagggcgagacgaacaacgcgcgcaggag

SEQ ID NO: 251830 - RNA, 76 nt, Homo sapiens
cccaggacaagaccaagaaccggcaggagcacgcagagacaggccaccgcccacagaacagacaccgggcgaggga

SEQ ID NO: 251831 - RNA, 66 nt, Homo sapiens
aaaagggaccgaaggaagagccaccagcgacaaacaggaaagaaccggaaacacccgagcagaaga

SEQ ID NO: 251832 - RNA, 52 nt, Homo sapiens
aaaagagaaagagaggccccgcaggcccccaggagccgagcgcccccaaagg

SEQ ID NO: 251833 - RNA, 69 nt, Homo sapiens
gacggacaggaacacaccggcagggagacggccacagccagcaggacagaacgaccgcccggccagccc

SEQ ID NO: 251834 - RNA, 81 nt, Homo sapiens
ggagggcacgccgacagccaggaaagcccccaacagagacacaaggggagaagggaccacgcccacgacggagcgcgcggc

SEQ ID NO: 251835 - RNA, 82 nt, Homo sapiens
cccaaacagaccacccccggcgaccacaaggccgcgaccacccaaccccgagcgcaccaacgaggaggcgggccgccgccgg

SEQ ID NO: 251836 - RNA, 69 nt, Homo sapiens
accgacaaccaagggccccgcggaccaaggaagaacccgaagcaccgggcgccggccgagcccgggaaa

SEQ ID NO: 251837 - RNA, 71 nt, Homo sapiens
gggcccggggaccccaacgccaagggagccagaaaaacacagcgggaccggcaagcacccccccgagcaac

SEQ ID NO: 251838 - RNA, 90 nt, Homo sapiens
cggcggaggcgacggggcggcccggagccggcgcgaaccggcccccgcagcgggacccgggggaggcaagacggccccaagaagagggga

SEQ ID NO: 251839 - RNA, 76 nt, Homo sapiens
aaaaccaaggcacaagagagcggcaccagcggaggcccgcagccccaaggacagccagcgggcaagcggacccacc

SEQ ID NO: 251840 - RNA, 87 nt, Homo sapiens
cagccccggagccgcccaagccgcgccccagagagcgcccgagagaacagggggccgcggccaggaagaaggggaaaagcacagaaa

SEQ ID NO: 251841 - RNA, 77 nt, Homo sapiens
ccggcggccacggccggaaggcagcaagccagaggagcaaaaacgagagaccaaaaaaaacagaaaagaagaaaaaa

SEQ ID NO: 251842 - RNA, 56 nt, Homo sapiens
ggccggcggacggcggcgaaggaaccgggagcagcaacacacccggcacgcggccc

SEQ ID NO: 251843 - RNA, 53 nt, Homo sapiens
gagaacggcacacgcgagcggagaccgagaagcaaagcgccgggcaccagcaa

SEQ ID NO: 251844 - RNA, 70 nt, Homo sapiens
aaggcgacagcccgccaagacaggccgggaacgggaaacgcgcgccgagaagccacccgccgagagggag

SEQ ID NO: 251845 - RNA, 103 nt, Homo sapiens
cgcccgggccagcggccgcgcacccccggccggaggcaccagcggcccaggaacccgaagcgggcgagccagagcgcgccagaaccccgcagagggccggcag

SEQ ID NO: 251846 - RNA, 83 nt, Homo sapiens
gcagaagcacgacagggcagggcagaaagcagggagagagacagcggacgggagaccgagccacaccacgcgcaggcccgcaa

SEQ ID NO: 251847 - RNA, 80 nt, Homo sapiens
cggccgacccagagccacccaccgagagacagaaagcagaggccaggaggggcccagcccggccaggaggcggcggaaaa

SEQ ID NO: 251848 - RNA, 79 nt, Homo sapiens
ccgacagccgggaacgcaaaagcagaccggaaaacccaccggcaagaccacacccgaggggagcccaggacaccacgaa

SEQ ID NO: 251849 - RNA, 76 nt, Homo sapiens
ccacgcccagcagccggggaagagacccaaacgccaacagaaacgcaccaccaaggaagcagggaggaaaggccgc

SEQ ID NO: 251850 - RNA, 72 nt, Homo sapiens
gaccaagaaccaggccgagcgcaccagccgagagcagcaagacaggaacggacaaagcggacaccgcggaag

SEQ ID NO: 251851 - RNA, 74 nt, Homo sapiens
gcccaacaacgaaaaccggaggggaacggcgcggagcggagcggcaggacacacagaggagcgacacgcagacc

SEQ ID NO: 251852 - RNA, 53 nt, Homo sapiens
acagccccgacgggcggagaagagaaacgagggcacacgcacagggggcaaca

SEQ ID NO: 251853 - RNA, 75 nt, Homo sapiens
ccagccacccaaacaccaagggccgccgcaggagcggagacaaaggacaccaccagggaacggagaggacaagaa

SEQ ID NO: 251854 - RNA, 70 nt, Homo sapiens
gaggacgcaggcccgggaccacaacccgaagggggcggagccacgagaccaaagcagcgcgccagggaaa

SEQ ID NO: 251855 - RNA, 67 nt, Homo sapiens
aaaacaaacagcaaagaacagcagccggagcaacgagaagagagcagacggccacaaacagcgcaca

SEQ ID NO: 251856 - RNA, 71 nt, Homo sapiens
gaccaagcccccagacgaaccggcccagaaaacaggaaaagccaaccgggagaggacacagagcgaaacag

SEQ ID NO: 251857 - RNA, 71 nt, Homo sapiens
agcgaaggaagccacccggcaagaaaggacagcaagcagagagaaacagcaaccgcccagagaacgaaccg

SEQ ID NO: 251858 - RNA, 75 nt, Homo sapiens
ccaaccgcagagggaccgggccacccgggggcccacaggcggaggcagaacaccacgaagccacgaacgaacgcg

SEQ ID NO: 251859 - RNA, 45 nt, Homo sapiens
gcccagagggcccagaaaccaggagaccccaaggagcagaagggg

SEQ ID NO: 251860 - RNA, 53 nt, Homo sapiens
ccccacgccaccgaagagccaagcccagagccagccgccgcgccaagaaacgc

SEQ ID NO: 251861 - RNA, 72 nt, Homo sapiens
gcggccgccgggggcccagagccgcaacaagcagggggcgaggaagagacaggcgggggagaagaagcaggg

SEQ ID NO: 251862 - RNA, 57 nt, Homo sapiens
cagggaccgcgccaacggaggaaaagccaagaaagacccaaaagaccccagaccaga

SEQ ID NO: 251863 - RNA, 84 nt, Homo sapiens
aaaagaaagcaccgccgcacagacccaacagggaagaaggagaaagggccaaccccgaagaagcaaacagaaacgaaggagaca

SEQ ID NO: 251864 - RNA, 71 nt, Homo sapiens
ggccgagaagcggggcaccacgaaggaccgaagagcgaaggacaagcagcagcaagacccggcgagacaag

SEQ ID NO: 251865 - RNA, 81 nt, Homo sapiens
aaagacggaaccgggaaggcagcagcacgcagaagggaggagcagcccaacagaaggcaccaccaagcgaagacggcgcgc

SEQ ID NO: 251866 - RNA, 54 nt, Homo sapiens
agacgggcgccccccgccggcccggccagccccaaaagcacgcacgaaaccggc

SEQ ID NO: 251867 - RNA, 50 nt, Homo sapiens
ccacccccccggacaagccacacccaggcaggcagcgggaacaccagagc

SEQ ID NO: 251868 - RNA, 66 nt, Homo sapiens
gcagcgagccgcgcaggcacaacggacacagaccacacgcacaagccccgaaccaaagacacggag

SEQ ID NO: 251869 - RNA, 77 nt, Homo sapiens
gaaagccccgacccaggaagagccgcagagagcccccagggagggccaccaagggacaaggagagaaagaacaaaga

SEQ ID NO: 251870 - RNA, 76 nt, Homo sapiens
gagcagcaaaccgggcagccccaaacggaaagaagagcaaaaaggaaggaaaacggacgagaacaagcggaaaaca

SEQ ID NO: 251871 - RNA, 59 nt, Homo sapiens
cggcagccagcaggacaccggaagacagaagggccggcgcggcccagcaagccgaaagc

SEQ ID NO: 251872 - RNA, 77 nt, Homo sapiens
caaggagcggaaaacacgggccaacacggcgcgaaagccagggaagggcaagggcgcagcacgcagacccgcaagcc

SEQ ID NO: 251873 - RNA, 76 nt, Homo sapiens
gggaagacacgaggggcagaaagagaccgcagagacagccaacacggcacccacaggaggcagaagagaacacaga

SEQ ID NO: 251874 - RNA, 78 nt, Homo sapiens
ggacaacgcaagggggaagagagagaaacaaaagcgccagagccaagaacgcagagaagaccagaaaggggacagcga

SEQ ID NO: 251875 - RNA, 73 nt, Homo sapiens
gagccacacacggggaaggcaacaaaagaaacgaaaaaggcagaagaacgcagacagaagaaggaaacaagag

SEQ ID NO: 251876 - RNA, 64 nt, Homo sapiens
gccaacaacacgcaaaaaaaagacacgacagcaccaagcaaagaggaaaagccaagaaagaccc

SEQ ID NO: 251877 - RNA, 51 nt, Homo sapiens
gccccaccgccgacgcccccagccaccagaaaaaggcacaaacccagcaca

SEQ ID NO: 251878 - RNA, 74 nt, Homo sapiens
gcgcccacagcaagcagagaaggggacggggaggaccagcgcgcgcaaggcacaggagagaaggaggccagcac

SEQ ID NO: 251879 - RNA, 117 nt, Homo sapiens
ccaaccaggggaaagcaagacagagggagacacccaccacaacaccaacacccaagagaaaggacgcgagagaagccacagcagaaaagacagaacaggccaagaacaagagacagg

SEQ ID NO: 251880 - RNA, 85 nt, Homo sapiens
cgaccgggcaccagcaggacccgaggccaggagccaggggcccagaagaaaagaaacgaagccgggcacggacaggacagagaaa

SEQ ID NO: 251881 - RNA, 83 nt, Homo sapiens
gccagagaaagaagacaaagagacccgaagcggggccacaacgggaagaaggaaacggaggcaagaaaaaaggaaacagggga

SEQ ID NO: 251882 - RNA, 80 nt, Homo sapiens
aaaaccccgagggaaacaagaaaacacaaagaggcagcaaagggcaaaagcccacagagagagccaggaccaaggccgcc

SEQ ID NO: 251883 - RNA, 76 nt, Homo sapiens
gccccggccccgccagggcgcgcagcccgccccccgccgcgcaggaaggaacgcggccacgaaaaacgaaaaaagc

SEQ ID NO: 251884 - RNA, 81 nt, Homo sapiens
gagaaacagaaagagggacgagggcaccgcaaggcaccgagcccagcagacccgaggaaggccaccgaagggcaagacaag

SEQ ID NO: 251885 - RNA, 79 nt, Homo sapiens
gcgagcgaacacagaacacaagaaacaagcaacgacagcagaccgaaaagggcggaaaaggaccaaggcccgcaaaagg

SEQ ID NO: 251886 - RNA, 72 nt, Homo sapiens
accgaccgcacggggaggaagggaaagacaaggagccgggccgagaaaccgaaccagagaccagagaagaaa

SEQ ID NO: 251887 - RNA, 84 nt, Homo sapiens
aaagggaaaaaacgaaggaggcaggaagagcggaggacagcagagggcacagggcccgaccaacacgggaaaggggcgaggagc

SEQ ID NO: 251888 - RNA, 74 nt, Homo sapiens
gagacaaaccgacagaagagcggaaacacaggacagagagaaagaagcagagcccagccaagccagaaccaggg

SEQ ID NO: 251889 - RNA, 73 nt, Homo sapiens
agaagagacaccagagccaacgggagcagaggacccagggagaacccaccacgagaggcaaaagccaggaagc

SEQ ID NO: 251890 - RNA, 80 nt, Homo sapiens
gacgagcacgcggagcaccccggggggggcacacagaacaacaaggggagccgccggacgggaccgacgcaggcgggccc

SEQ ID NO: 251891 - RNA, 69 nt, Homo sapiens
cgagcgggaggcagccgggccgaggacccacccaggaggcagaaacacgccgcgcgccacaccaggccc

SEQ ID NO: 251892 - RNA, 95 nt, Homo sapiens
gccgcccaagccgcacagccgcggcggcagcagcaggagaggaaaccggagaagacacaccacagagcacccagagcgacgccgggaacaggccg

SEQ ID NO: 251893 - RNA, 88 nt, Homo sapiens
ggcgacggggcagaggcgcgccgggagcgcagaggcggagacagaggggccaacccgcgagcgcggaaggacaccgggaccggggaag

SEQ ID NO: 251894 - RNA, 73 nt, Homo sapiens
ggagccccggcggcacgggcacgacgggacacccagcaacaccaggccgcagaccaagaagaaaaacacacga

SEQ ID NO: 251895 - RNA, 70 nt, Homo sapiens
ggccagaaccagagaaggaaagcaaagcgaccaagagcacaaggccagcccgcccgaaaccaaaggcagg

SEQ ID NO: 251896 - RNA, 61 nt, Homo sapiens
aggcacagcagaagcacagacaaagacagacaaagaccacccggggagacagaggccacgg

SEQ ID NO: 251897 - RNA, 72 nt, Homo sapiens
agaaccagggcggcggccagcgccacgcggccgggaggaagaaacccccacgcaagggagcaaaaggccagg

SEQ ID NO: 251898 - RNA, 80 nt, Homo sapiens
gccagccgagcacccccaagcagagagggaaccagaggacagacaacaccgagaacacgggggaccagggaaaagaaaag

SEQ ID NO: 251899 - RNA, 73 nt, Homo sapiens
cgcgaaagcagccagaagcaccgagaaggaagaggcaaggaaccaagccgcagagcaagcgaaaacaaacaag

SEQ ID NO: 251900 - RNA, 75 nt, Homo sapiens
gaacaggcaacacagggacgcccagaaggaacgcaggaagaaaacaggcgaaacaaggcacccccagcgccgaac

SEQ ID NO: 251901 - RNA, 75 nt, Homo sapiens
gacggcacagagaccccccggccccggccccgccgcaccccgggccaaccgccccccagcagcaggcacgggcga

SEQ ID NO: 251902 - RNA, 80 nt, Homo sapiens
gcccaacagaagaaaggcaggagcagccggagaaaacacggagaagagaggaacaaaccaaggcaacaggaaccaaggaa

SEQ ID NO: 251903 - RNA, 82 nt, Homo sapiens
aaacgacggaggcagcaaaaaggaaaagagaagcaggaacggagccagagggcggccgacaggcccgagagcccccagacag

SEQ ID NO: 251904 - RNA, 58 nt, Homo sapiens
gggacgggcagaaagcacggacgacgccccaagcaggaccgaaacccgcacccacccc

SEQ ID NO: 251905 - RNA, 76 nt, Homo sapiens
gcggcgagaggccaagaagcgagagcagagagcgcgcgaggagggggggccgaagaagccagggggaggaaagcag

SEQ ID NO: 251906 - RNA, 76 nt, Homo sapiens
gggaggccgcccagaagcggcgcgcacggacgcggagaggggagccgcaggggccgagacaacaagaaggggagga

SEQ ID NO: 251907 - RNA, 64 nt, Homo sapiens
gcgcaaaaacaagacggggcgccccacagaggggcgacggagcggaagaaacccagacgccgac

SEQ ID NO: 251908 - RNA, 58 nt, Homo sapiens
ccggccaccccgcacgcggaagcggccgcggggagccaccccagcccgagccacaccg

SEQ ID NO: 251909 - RNA, 90 nt, Homo sapiens
gaagagcagcaagcgagccgcgcacgaccaccacccagaggcccagcagcagacaccaccggaggccagagcacaaccaccacaaccggc

SEQ ID NO: 251910 - RNA, 52 nt, Homo sapiens
caaacgggagacaacccccgaaggagggaaaccggagcacgcccgaagagcg

SEQ ID NO: 251911 - RNA, 62 nt, Homo sapiens
acagcagaaacaaagaagcagcgcgaaagagcagcccgacggccaggaggcgaagagacgag

SEQ ID NO: 251912 - RNA, 62 nt, Homo sapiens
aacgggaagacacacccgacccaggcaagaacggaagcacgggcggaggaaagcacaagcag

SEQ ID NO: 251913 - RNA, 71 nt, Homo sapiens
gcaggcacagaacaagccccgagcgacggcgagacccagaagggcgcgggaacaaacgaagagccgagaaa

SEQ ID NO: 251914 - RNA, 66 nt, Homo sapiens
acccacgggaaggagaagaagcccagggaagagaacggaccgcagcagcaaacagaaggccgagca

SEQ ID NO: 251915 - RNA, 76 nt, Homo sapiens
cgcgccggagcaagggagagaaagccagcacaccccaagagcccaccagagcccaagaccagccgggcgagcgcgg

SEQ ID NO: 251916 - RNA, 76 nt, Homo sapiens
ccccaggccaagcagccaccagcagcccccagagcgggaccacagcgcaggaaacagagaacaaagggcggcacaa

SEQ ID NO: 251917 - RNA, 83 nt, Homo sapiens
cagcccgcggaggccgcggagcgccagccaagaaggccagaggaaggaaaggagcaggacggaagaggagaaaagagcaagag

SEQ ID NO: 251918 - RNA, 79 nt, Homo sapiens
cgcggagccgaggcggagccgcgcccgccccagcggcccgcccaacgcccgaccgcgcacaaggccggcggccagaaac

SEQ ID NO: 251919 - RNA, 98 nt, Homo sapiens
agagccgacgagcgcgcacaacgcaggaccggcgccgaaggcccgccaggaaaagaaggaggccagcgggacacacaaagaaagacgaaggacaccca

SEQ ID NO: 251920 - RNA, 72 nt, Homo sapiens
ccgcagcaccagcgcgggccgacggcaccaaacggcaaggaggaaaaaaccagaaaccagacggcggcgaga

SEQ ID NO: 251921 - RNA, 82 nt, Homo sapiens
aagagacaggaggcagagccaaacacccagacgacgcagccagagcagcaagaggccaaggggacgacggccacgggcccgg

SEQ ID NO: 251922 - RNA, 72 nt, Homo sapiens
agaaacggcaacagccggacccaacagaggcagccaaagagaagcaggagaaggaacgggaaaagaccaaaa

SEQ ID NO: 251923 - RNA, 81 nt, Homo sapiens
cagaccgcagaaggccggagacaccagcaggaaagcggagggaaaggccacccaccacgagcgccccccgagaccgaccag

SEQ ID NO: 251924 - RNA, 66 nt, Homo sapiens
caggacagaagacaaaagagaagaagcagaggagaagagcgaccagcggagaagccaagagggagc

SEQ ID NO: 251925 - RNA, 68 nt, Homo sapiens
caaggggaacaaaacgacagacggaagcaccccgcccagaggcagcgaggagcccccaaggcacaggg

SEQ ID NO: 251926 - RNA, 68 nt, Homo sapiens
gccgagaggaccgggcaacggaaacaagcagggcgaagcgaggaacaaggcccaaaaaaacagcacag

SEQ ID NO: 251927 - RNA, 83 nt, Homo sapiens
gggagcggcaggagggcgggcggcgggcggaggagcaaagaaggcgggggccaccaaaaaaggggaaaccagcgcaccaggag

SEQ ID NO: 251928 - RNA, 84 nt, Homo sapiens
cccggccccgaagggcacgcagcagacagccccgggcaccaggcagcaacaggacaccaggggggaaaaaccacacaggcaaag

SEQ ID NO: 251929 - RNA, 80 nt, Homo sapiens
ggagggagcgaggaaccaccggacgaagacagcaaggagacccgccaaagccgccgggcaagcagaccgaaaagggcgga

SEQ ID NO: 251930 - RNA, 92 nt, Homo sapiens
cgagaggagagcccagccccggggaggcggcggcggagacggagccgcagcagacaacacacacgcacaagcgaaaccaagagagagagaga

SEQ ID NO: 251931 - RNA, 76 nt, Homo sapiens
gaaagaagcgcagcggaggaaggcgaggcccagaaagcgggcaccagcgcaaggaacccagcccaacaccaccaaa

SEQ ID NO: 251932 - RNA, 57 nt, Homo sapiens
ccggcgcccaaggagaggccaaaggcaaaaggaagaaacagaagagaagaagacgcc

SEQ ID NO: 251933 - RNA, 74 nt, Homo sapiens
aacagagaacacacgcaacgaaccgaggagagaaaaaaaagcggcgaaccagggaggacgcccgaccccaccca

SEQ ID NO: 251934 - RNA, 74 nt, Homo sapiens
aagaagcaaagcgacagaaggagggaccggccggggcaaggagaaaaaacccaaccaggaaacagggggccaag

SEQ ID NO: 251935 - RNA, 77 nt, Homo sapiens
accgccaggcgggcccccgcggcccgggcgagcccggagaagaggaaggaccgggaccggcgggccgggggcgaagg

SEQ ID NO: 251936 - RNA, 72 nt, Homo sapiens
gaggaagcacaccaccaaggaacgggcgcagcgagaggaaagaaaggcacccccagcaacacgcaacgcaaa

SEQ ID NO: 251937 - RNA, 81 nt, Homo sapiens
agaaaaccgacaacccccagaaagccaagccgggcacggccggaaggacaggcaagacccaggacggcggcgcaccgcagc

SEQ ID NO: 251938 - RNA, 46 nt, Homo sapiens
cgcgaaggacaagacgcgggacgcaacccaccacgaagcggagagc

SEQ ID NO: 251939 - RNA, 79 nt, Homo sapiens
cccccaccacaagaccccccgggaggaccgcaccgccaagccaagccaacccaaacagacgaggggaccgaagcggcgg

SEQ ID NO: 251940 - RNA, 79 nt, Homo sapiens
ggcagcgcaacccaacacggacagaggcacagaaaccgcgcgccgaaaccagccaagcaaccggaaagaggcagaacac

SEQ ID NO: 251941 - RNA, 57 nt, Homo sapiens
ccccgcagacgggacacagcacaccggagagacgaggagccggcccaacagagaacg

SEQ ID NO: 251942 - RNA, 64 nt, Homo sapiens
cccagcgcgggccgaccgggcgcagcggagcgggcacggacacaagaacgagagccaaaggcca

SEQ ID NO: 251943 - RNA, 83 nt, Homo sapiens
gcacagggacgccacccacacaggccaagcccccgacgcacaaaagccggagcaggccgggcccgccagggcacgcgcccgcc

SEQ ID NO: 251944 - RNA, 64 nt, Homo sapiens
cacgcccgcgcgaggggagaagcagaccgcaccaggcgggaccccgaaaaagcccaaacagaca

SEQ ID NO: 251945 - RNA, 75 nt, Homo sapiens
agaccagcggacaacaaagaaggggcaaagagcgccgagacgaggagaagaaaggagcgcacccacacaagacag

SEQ ID NO: 251946 - RNA, 50 nt, Homo sapiens
ccggcgggcgccaggcagcagggcgaagcgggaagcggcaccaacccggg

SEQ ID NO: 251947 - RNA, 84 nt, Homo sapiens
cgccgagaaggagggaggggaaacacaaagccggcacgcgcgcgagagaccagaagcgagaagggagcacgagcggaggaacaa

SEQ ID NO: 251948 - RNA, 80 nt, Homo sapiens
aagagcgccacgcacagcgaggggccaaggcagaagaaacggagaagggcaaagggcgggaggagccgaggcccaacaag

SEQ ID NO: 251949 - RNA, 69 nt, Homo sapiens
accagagcgacgggcaggaaggagggggcgcacaaacgaggacaaggcacgaggcgcggcgaccaccac

SEQ ID NO: 251950 - RNA, 80 nt, Homo sapiens
cgggacggaggggagccccacaaagggcggagcggggcgcaccggagacacggagggaaggacaaaacagggagggcagc

SEQ ID NO: 251951 - RNA, 79 nt, Homo sapiens
acacaagcccaccaagcaaagaggcgcccagaaagcagaacaggccaccgggccaacgaaaagcccacggcccaggcgg

SEQ ID NO: 251952 - RNA, 72 nt, Homo sapiens
cgcaagacaacaggagaggaaagcggaaagccaagggccgagaagaagcggggacggcaaaacagccaacgg

SEQ ID NO: 251953 - RNA, 77 nt, Homo sapiens
caaaaaccagaagacaagcagcgacgaagaacggaagcgccccagaggagagggcggagagacggagaaaacgcagg

SEQ ID NO: 251954 - RNA, 62 nt, Homo sapiens
gcgggagcagaagccgcccggcccccgcagacaacggccggagagacagcacaagggccacc

SEQ ID NO: 251955 - RNA, 78 nt, Homo sapiens
aagccccgacagagcggcgcgcggaggcgcacaaaggaagggccaaagccccaagaacccagccacgcaaagcgggga

SEQ ID NO: 251956 - RNA, 72 nt, Homo sapiens
gagcgcgcgaagcggggagacggccagaccagaaagggggagcggccgggcagggccggcaacagcccggga

SEQ ID NO: 251957 - RNA, 76 nt, Homo sapiens
ccaggacgcggaacgggggagagcccaacaagcgagaaacgaaaacaaaagaaaagagagcaaagaggaaaaagaa

SEQ ID NO: 251958 - RNA, 62 nt, Homo sapiens
ccgcagccccgcgggcgccgcaggaaacggaggcgggggcagcccgcccgcaggaacggagc

SEQ ID NO: 251959 - RNA, 95 nt, Homo sapiens
agaaccccagcggagaaccaccgcacaagagccaagaacaagggccgcgagggaacggcggagaaaccaccacaaacacgaggccagcaacgacc

SEQ ID NO: 251960 - RNA, 83 nt, Homo sapiens
aagccagccacaccaggcgagaccccagggcccgcagccgcagcaggaagaaggcgcgcacaacaacaaaaccagagaaaacg

SEQ ID NO: 251961 - RNA, 76 nt, Homo sapiens
gagcgaggacgccggcaggccaggacagaagcacggaaggagggccaacagaaagggacacccaaacaacaaaagc

SEQ ID NO: 251962 - RNA, 72 nt, Homo sapiens
gacaacgggacccagaagagagccacgggcccaggcgaagcagcccaaacccgggccaagcccccgcccagg

SEQ ID NO: 251963 - RNA, 61 nt, Homo sapiens
agacccaagcaacccgcggggacagggaaaaagccaaacggcagcggcaaaacaaccccag

SEQ ID NO: 251964 - RNA, 77 nt, Homo sapiens
accgcccccgagcccggaggggggagaaaagagggaacaggcacgccccacccgccagccgagcccccgacgcagca

SEQ ID NO: 251965 - RNA, 76 nt, Homo sapiens
aagggggaggggacaacaagccaaagagaagggaaggacaagaccgaacaaggagaaaggaacaccaagaagccca

SEQ ID NO: 251966 - RNA, 50 nt, Homo sapiens
ggagggacaaagccacgagcagaagagaaacggggacgcgcagggaaacc

SEQ ID NO: 251967 - RNA, 73 nt, Homo sapiens
ggggagaagccaacggcacaaaaggggcaaagaagaagaaaacacgcccagcccgagcaagagaacagggaaa

SEQ ID NO: 251968 - RNA, 80 nt, Homo sapiens
ggcagcccgccacagccacgggggcccacgagaagagcaggcgacgggggagagggagacagcggcgcaaagaagggacg

SEQ ID NO: 251969 - RNA, 83 nt, Homo sapiens
ccgaaaagagccgacaaccagcgccgcgccacagaacgagcaccgagacccgcccaccagagggggaggggagcaaagaacac

SEQ ID NO: 251970 - RNA, 74 nt, Homo sapiens
cagaagaacgaggcccgccaaggaacccgcggggcagaccacaccagcacacccagcacggcaaacaaagcaaa

SEQ ID NO: 251971 - RNA, 60 nt, Homo sapiens
cagaaggcagaggcagaaccacagagcaagaaagccgccagccaggcacgagccacgcca

SEQ ID NO: 251972 - RNA, 73 nt, Homo sapiens
ccccccgaggaggagcgcaagaccgcaaaacgggacaagcccgcacgcgcagagacaagcccgcgcgcgagac

SEQ ID NO: 251973 - RNA, 50 nt, Homo sapiens
cggagcgccaaacggcaccagaaaggacaggcccagacagccagccacgc

SEQ ID NO: 251974 - RNA, 39 nt, Homo sapiens
gaccgcccgccccgccggggaacacagccaggacccagg

SEQ ID NO: 251975 - RNA, 86 nt, Homo sapiens
aaaaagcggaagaaaacagaagaggcggggagaaagaaggagacggaagggaccagcacggggacgaaaagccggcaccacggcaa

SEQ ID NO: 251976 - RNA, 81 nt, Homo sapiens
gcagaagaagagcagaaaaagcagccaggaaccaagaaaacgcggaagccgcagaaggaccggccagaagcaagccggaga

SEQ ID NO: 251977 - RNA, 76 nt, Homo sapiens
cgcggagggggagaagcacaggcaacggagggcgggggcggcagagggcacgcccaggggacgggcagacaagcgc

SEQ ID NO: 251978 - RNA, 78 nt, Homo sapiens
gagaaacccaagagcagcggcaggagcaaacccgcagggaaaggggaaacggcccagaaggccagacgagcaggccag

SEQ ID NO: 251979 - RNA, 79 nt, Homo sapiens
cgaggggcccgggcccagagcggaagacaagacgaacacaggcagcaccccaacgcagccccgcccgccgcccccacgg

SEQ ID NO: 251980 - RNA, 70 nt, Homo sapiens
gacgcggcggggcgcaaaccgagacaagcaccccgaagcgccgcccagccaggcgcaaaagggccaaaaa

SEQ ID NO: 251981 - RNA, 86 nt, Homo sapiens
aaaaccaggggcaaaggacagacagaagggaaagggagcagcaccggccacacccacagcacgaccggaacccagcgaccgacgcc

SEQ ID NO: 251982 - RNA, 46 nt, Homo sapiens
aggcgcgggaggggggaccggcccagagcgacgggcggaaacccaa

SEQ ID NO: 251983 - RNA, 89 nt, Homo sapiens
cggagacagaccccggcccggcgaccgagcgggcccggagccaccggcccaggagaaccagcgcccgacccgcaacaacaacgagcccc

SEQ ID NO: 251984 - RNA, 77 nt, Homo sapiens
caagaagaaggcgggagggcaccaggccagaacaggccacagccgcaaagaaaccccaaagccagcaagaccacagc

SEQ ID NO: 251985 - RNA, 77 nt, Homo sapiens
gaaaaaagcggaagcagaccacgaagaaggcggaggaaggcccagaccagcacaaaacagaacgaaaaagcggaaga

SEQ ID NO: 251986 - RNA, 66 nt, Homo sapiens
gaaaccaaggagcgccaaagagaaagagcaagaggaagaccgcaaagagccgccgagccccagagg

SEQ ID NO: 251987 - RNA, 82 nt, Homo sapiens
cgaaggcgggaagggaagcggccaaggcacggaggccgcggcacaaaccgaagagcccggggcgggacgccacgaaagaaag

SEQ ID NO: 251988 - RNA, 62 nt, Homo sapiens
cggccgcgggaggagagccagggacgggcagcaaggaagaagacggcacgggacccccagca

SEQ ID NO: 251989 - RNA, 68 nt, Homo sapiens
agacacagaaacaaggccaccacaggaacaagacccagggacacaccagggggcaggccagccagaac

SEQ ID NO: 251990 - RNA, 63 nt, Homo sapiens
ggcgcgaagaggacggaacacagcacaaaagggagaacaaaccaggggagggaaacgagaaaa

SEQ ID NO: 251991 - RNA, 38 nt, Homo sapiens
ccccaaaggcggggacaggacacaagaaggaaagggaa

SEQ ID NO: 251992 - RNA, 70 nt, Homo sapiens
cccggcagacgggccggggcgcagaacaggagccagggaacacacacccgagaacagccgccaagccacc

SEQ ID NO: 251993 - RNA, 80 nt, Homo sapiens
cgggggcgggacagcggcccccggagggggcagcccgggagaaccgcggcggccggagcggagcggcagcccacaagcag

SEQ ID NO: 251994 - RNA, 56 nt, Homo sapiens
ccagggaggcaggggcagaaacagagaaggaacagcacgcccccgcggcagaccgc

SEQ ID NO: 251995 - RNA, 84 nt, Homo sapiens
agcgcgggcggagacaggccaacacgcgggcagcgaacaagcgggagcaaggagggcgaagagcgaggagacgacaagcccgac

SEQ ID NO: 251996 - RNA, 87 nt, Homo sapiens
caggagaggcgcggagccgcagccgcccagaccgcgcagcgcgggaggcaggccgcacgagcacgcagccccgaaggcggcccggcc

SEQ ID NO: 251997 - RNA, 71 nt, Homo sapiens
gacgagaagcacgacgagagaaaaggaggaggacggcacaaaaaaaggcagagaagaggagcaacaagggg

SEQ ID NO: 251998 - RNA, 63 nt, Homo sapiens
gcgagccgcccggaccgcgcaccacaggagcgggaggaggcaacgagcgggagggaaagcaag

SEQ ID NO: 251999 - RNA, 59 nt, Homo sapiens
gccgccccaacaccagggaagagacacacccagcacacaggccacccacggccgggcag

SEQ ID NO: 252000 - RNA, 68 nt, Homo sapiens
cagcgcccagagagacagcgcacgaaacacacaaagaaccaccaccgggaggaagccagacaacccca

SEQ ID NO: 252001 - RNA, 80 nt, Homo sapiens
ccacccccgagcccagccaccccagcaccacaggcacccacagaagacacaggagcagaagcaccccaggacgggcacgg

SEQ ID NO: 252002 - RNA, 81 nt, Homo sapiens
ggccaagaggcagcaagaggaaggcgcccgcggcgacgggggcggcgcccccgggcgacacgacgaccgaaacaagagcag

SEQ ID NO: 252003 - RNA, 72 nt, Homo sapiens
agcgaaccccgcgagggaggaacccagaacggagggcacgagcgggccgagaccagaaaaaggcacaaaccc

SEQ ID NO: 252004 - RNA, 74 nt, Homo sapiens
aacagggcccacacaggaacaggcaaggggagcacggcccaggcagccaagaaggcagagagacacacaagaaa

SEQ ID NO: 252005 - RNA, 70 nt, Homo sapiens
gcagacccacggagagagacggcccaaagaggcggagcccggcacgggcaaacagagcaggcagggaacc

SEQ ID NO: 252006 - RNA, 77 nt, Homo sapiens
caagccacgaccggcggggcgcgccaaggacacggcacaccgaccgacgggagaagcccaccacgcaacgggacggc

SEQ ID NO: 252007 - RNA, 56 nt, Homo sapiens
ccaaggccgggaccgggacaggaagggagaagccgcgggagcggaagacaggcccg

SEQ ID NO: 252008 - RNA, 50 nt, Homo sapiens
agcggcgacacacgacggggaaaaaccaggaacgaggagcaccagacagc

SEQ ID NO: 252009 - RNA, 60 nt, Homo sapiens
gggaagcagcaccaacccggcccaccaaacccccaggagaaggaccaaaaggaacgagac

SEQ ID NO: 252010 - RNA, 81 nt, Homo sapiens
gaagcgggcagcacaaaacaaggccggacgaaagcaaggaggggcaggagcacacccccacaggaccccccacagaaggcc

SEQ ID NO: 252011 - RNA, 48 nt, Homo sapiens
aaacacgacgccacgacaagcgccaaacacagcaaggcaacagaacag

SEQ ID NO: 252012 - RNA, 65 nt, Homo sapiens
caaggagggaggaacgcaacaaaacgacacaaaaggagcagagacgaccgcccacccgcaccgcg

SEQ ID NO: 252013 - RNA, 75 nt, Homo sapiens
cgggccgggcggagcggagacggggagcgcgaggaccgcgggggcaggacccaaagacaggaccacgcaccagca

SEQ ID NO: 252014 - RNA, 81 nt, Homo sapiens
gaagcaggaaggaggcagaggcacaccgaaagcaaacggggacagcgccgaccggaacagggaccacggaagcccaggacc

SEQ ID NO: 252015 - RNA, 77 nt, Homo sapiens
aaaaaccagaagacaagcagcgagcgcccaagaggaccccgaaggagcgggagcgcagaagaacaacaccacagaag

SEQ ID NO: 252016 - RNA, 39 nt, Homo sapiens
ggaccgcgggggagaacgccagcaacagaagaaagcaag

SEQ ID NO: 252017 - RNA, 77 nt, Homo sapiens
gagaaaggaaaaagacccgccgagggcggcgacggcggcgcgaggaccgaccgggcccgcggacgaagaaggcaccc

SEQ ID NO: 252018 - RNA, 70 nt, Homo sapiens
aagggcagggccggggaagcaccaaaggccggaggcaccacaacacacccggaggaaagcccagagggaa

SEQ ID NO: 252019 - RNA, 75 nt, Homo sapiens
ccaccgcggccagccacgggacagggcgccagggaaggaccgcacacaagccgcaccggacacgcgcggagcggg

SEQ ID NO: 252020 - RNA, 75 nt, Homo sapiens
aaacccaagcaaagaccagcgccggaacaccaccgccaggccaggaaaacaacccaggccaccaaaaagaacagc

SEQ ID NO: 252021 - RNA, 75 nt, Homo sapiens
ggggccggaccagccccgaaacacggggaccgagcgaaagcagagaccacacaaggaagaaccgccccggcgcag

SEQ ID NO: 252022 - RNA, 37 nt, Homo sapiens
gccgagaaggcagaggcggagaaccaacagaggcaaa

SEQ ID NO: 252023 - RNA, 74 nt, Homo sapiens
agacacacaaggacgaccaggccaagcaagaaggcaggcgaacgaaggagggcgagggagcaaggacaccgcgg

SEQ ID NO: 252024 - RNA, 76 nt, Homo sapiens
caagggaagagaacacacggaccgagagaggccccagggaaaggaccgaggcaggaaagaggccagacgcagggac

SEQ ID NO: 252025 - RNA, 53 nt, Homo sapiens
cggccgcgcacccccggccggaggcaccagcagggaacaggcacgccccaccc

SEQ ID NO: 252026 - RNA, 87 nt, Homo sapiens
cagagaccgaggacgacagagaagggcaagacccaggaggacccgaccaacaaggaccagaaaggagacgggcggcagagaagagaa

SEQ ID NO: 252027 - RNA, 76 nt, Homo sapiens
aaacagcaagaacccaaaaggaggcaagaaagacacaaagacgagcgaggaaacccaaaaagcagcaaagaaagaa

SEQ ID NO: 252028 - RNA, 60 nt, Homo sapiens
gaaacagagcggaaaccagcaccacaaccccagccgacgaaaggcaggagaggagcagca

SEQ ID NO: 252029 - RNA, 37 nt, Homo sapiens
cgaaggacccagcagggcaccagacacgggcgcagcc

SEQ ID NO: 252030 - RNA, 86 nt, Homo sapiens
gcggaggccgcggaggccccggcccagcacccccggcccgacgcacccacgcccccaccccccgagagccggggcggaaacagacc

SEQ ID NO: 252031 - RNA, 83 nt, Homo sapiens
ccgggccaaggagacacaagaagggaggcgaccacgagaaggccggagagcagaccaccgagagcggaagccccggaggaacc

SEQ ID NO: 252032 - RNA, 77 nt, Homo sapiens
gaaaacggagccaaagaaaagaaacacagggacccaggagccgcgaacgcaagaaggcgccggcgaaagcaacgaag

SEQ ID NO: 252033 - RNA, 69 nt, Homo sapiens
gagagcggagccgaaaccaagccggacccgaagaccagggggccgagaggagagagcgaaaaaaggaca

SEQ ID NO: 252034 - RNA, 76 nt, Homo sapiens
gggggcggccgcccgcccaacagcagcaacccacacgcccgggcgggacaagcggcaagccacaccggcacagaac

SEQ ID NO: 252035 - RNA, 68 nt, Homo sapiens
agcagccacccacgagcccggcaaaagcgcacaaacgcccaagggagcaaaaggacggaagcaaggca

SEQ ID NO: 252036 - RNA, 72 nt, Homo sapiens
aaacagaagcgagaggaaccagaaaaagggagcacaaggaagagcagcccaacacaccggcacccgggagaa

SEQ ID NO: 252037 - RNA, 69 nt, Homo sapiens
aaagaaccgaaagaagcggaaagcagaagcgcgcagcaacggcgggagcagccgcaacagcgcaccgac

SEQ ID NO: 252038 - RNA, 54 nt, Homo sapiens
aaaaaagaaagggagcagacaaaacgccaagacaaggagcaccgcgccaaggcg

SEQ ID NO: 252039 - RNA, 80 nt, Homo sapiens
gcacgggcggccggccggccaggaggcgaggggccggcgagcagagagaccgcaccacccggacgaaccagaaggcgaaa

SEQ ID NO: 252040 - RNA, 50 nt, Homo sapiens
accaggaagacaggggaacacccccagagagagggccacagggaaagaca

SEQ ID NO: 252041 - RNA, 80 nt, Homo sapiens
agcaggcgcaagaccacaagcgcccggagcacagggcagcggagaccggccgacgcccgccgcggccggggaacaggcca

SEQ ID NO: 252042 - RNA, 57 nt, Homo sapiens
aagaggggaaagaaagcacggaggaaaggaccagaaaagaaggagaggacaccagaa

SEQ ID NO: 252043 - RNA, 56 nt, Homo sapiens
gcgggcccacgcggcgcaggcgaagccgacgagcccgaacagacgcaccagcggga

SEQ ID NO: 252044 - RNA, 81 nt, Homo sapiens
ggaaagcgagacgggaagggaaaggaggcccccaaagcgcgaccagaagaagaacaaacagcagaaagaaaccaaggagac

SEQ ID NO: 252045 - RNA, 64 nt, Homo sapiens
ggggggacaccaacgcaggacccccagggaacacaacagaagaggcccaaggcaccggaaggaa

SEQ ID NO: 252046 - RNA, 87 nt, Homo sapiens
gaagcagaagaaaaggagaaggaaagcgaaggggaaggcgccgaagaggacgaagggaaggccaaaaacccccggagacccagccac

SEQ ID NO: 252047 - RNA, 100 nt, Homo sapiens
aagcccagggcagccaggaaacagaggcggaaaccgacaaggacgaggggaccaccccaacaacagccagccccgagcgcccagaccgcagggccgcaga

SEQ ID NO: 252048 - RNA, 76 nt, Homo sapiens
gggcggaggcgccaggggcgaggcagcggcacccgagcgcccagagccccgggggccacgcaaggccggccccgag

SEQ ID NO: 252049 - RNA, 56 nt, Homo sapiens
ccaggcagaccacagaaaagcagcacgaagcaaaaacccacacaaaaaaagaggga

SEQ ID NO: 252050 - RNA, 73 nt, Homo sapiens
cacccgccggagcagcccgaggccccagccagcgaacgcggccacggagaacagaagagaggaaggcgaaaca

SEQ ID NO: 252051 - RNA, 85 nt, Homo sapiens
gaccgagcgagcgaccgacgcgccacccgccgacgcccagccgcggggcccgcacggaccccaccaagaacacagcacgaaaaca

SEQ ID NO: 252052 - RNA, 77 nt, Homo sapiens
cgaagaggcaccaaaaagaaccgcagacaggagagccacagcgaaacaacacaaacaaaaagagaacaaagagagaa

SEQ ID NO: 252053 - RNA, 73 nt, Homo sapiens
cacgggacagagcgacagagcaacacccccagggagcgggggcggaaacacggaagagggggaggccagggcc

SEQ ID NO: 252054 - RNA, 85 nt, Homo sapiens
gcagagccgggccagcccagaccgccccaacggacgcgggaggagggcgagggagcgaaaggcccccagagccgacggcccccac

SEQ ID NO: 252055 - RNA, 80 nt, Homo sapiens
accccagcagcacccaagcaggagacagggaaacgaaaaccaccgggcaccacgagcccacgagagaggacagccccagg

SEQ ID NO: 252056 - RNA, 39 nt, Homo sapiens
caccagcaccggcccaggggccgcccggggcgaaaggag

SEQ ID NO: 252057 - RNA, 60 nt, Homo sapiens
gcagggccccgcccggcggggaaggccaaaacagaagaggcaaagcccagccacagcagc

SEQ ID NO: 252058 - RNA, 74 nt, Homo sapiens
gggagccaccacggaaaaccccgcaccagacaagaagagaagcgaaggacgacagccaggggaggacaccacgg

SEQ ID NO: 252059 - RNA, 56 nt, Homo sapiens
aggaccgagaccaggaggaagacggcgaaggcccagagacagggaaggcccgcgaa

SEQ ID NO: 252060 - RNA, 87 nt, Homo sapiens
aaggggggccccaaacgaggcagcacacggaacggaccccagggaaagagggcggagaacggaaaagcaccaggaagcagagaggac

SEQ ID NO: 252061 - RNA, 82 nt, Homo sapiens
gaggcagcccgccgagcgcccgggggcggacagagcgggagccaccagcgccaaagggaagccaggagcccgggggcacggg

SEQ ID NO: 252062 - RNA, 66 nt, Homo sapiens
aagagacagacgaaaaagccagcaacagcacaacacgaaaggagaagaggacgggaggagaaaagc

SEQ ID NO: 252063 - RNA, 81 nt, Homo sapiens
acaggccgcggaggaggaggaggggaggcgcccccggagccgccccggaggagaagaaaaggccagacggccagcagccac

SEQ ID NO: 252064 - RNA, 115 nt, Homo sapiens
gcgggagcaacgaagcaaaacacaacacacgcaaaacagcgagggggacagccccaggaccccaccaaaacggacaaaagagcccccacgagaaggacagccggcagccagacag

SEQ ID NO: 252065 - RNA, 75 nt, Homo sapiens
caaaggcaaagaaagcagggcaaagggcgcagcggggaaccacacagccagagaggaggagcagaaagccagccg

SEQ ID NO: 252066 - RNA, 79 nt, Homo sapiens
cggggcccccagaaggacgccagcggagaacgcggcaaagcgagggcgggaaggggaaagcccaaagagagcagccaag

SEQ ID NO: 252067 - RNA, 69 nt, Homo sapiens
ggaggcggaagaaaggagcgcagaccgggggaaggagagacagaggcacaaaaggagaaagcagaagaa

SEQ ID NO: 252068 - RNA, 73 nt, Homo sapiens
acacacccaccggaggaggcgcagggcacaaagcaccgaggaccgagcaggaaaggaccgggcgagcaggagc

SEQ ID NO: 252069 - RNA, 74 nt, Homo sapiens
agagcacgcacaacaccaaggcccggggccccgccaggcgaagaagaccgggcaccacacaccacaaaccgagg

SEQ ID NO: 252070 - RNA, 68 nt, Homo sapiens
acgacagcaacaagacacggagcaaggaggaaaacacacgagaaagcaaaacagagaaacaggaacag

SEQ ID NO: 252071 - RNA, 83 nt, Homo sapiens
ccccgaggcgaggcgcccggcccccgcccgccgcgcccagagaagggagcacgcacgcgcaagggagcgaggcggccagggcc

SEQ ID NO: 252072 - RNA, 81 nt, Homo sapiens
gcagaccccaggaagcccaggggcggacaccagaggagccccacccccggagccgaggccaggagagagacggggcaccgc

SEQ ID NO: 252073 - RNA, 81 nt, Homo sapiens
gcccccgccgggcccgacgggcagccaagaagagagaccgggggaggcgacgcaaggcgacgggcgccgccccaagaggga

SEQ ID NO: 252074 - RNA, 73 nt, Homo sapiens
agaaagagagccaaaacggagacagagaggaggcagacccagaaaaggaccaccccccgacgaaccggggagg

SEQ ID NO: 252075 - RNA, 71 nt, Homo sapiens
aggagaccacccaaacgcggcacgggaggagaaccagccaaaaaagggcagaaccgacaacggggacccgc

SEQ ID NO: 252076 - RNA, 56 nt, Homo sapiens
aacaccaacaggaacagaaaggcccgaagaaaagaacaggaagccaagcagggcca

SEQ ID NO: 252077 - RNA, 70 nt, Homo sapiens
acaaccagcaccacccaacacagaccgaacaacgggagaagcccgacagagaaaggagaaaaggccgacg

SEQ ID NO: 252078 - RNA, 82 nt, Homo sapiens
ggggacagcagacccccaccacccaaccggcggcgcagacccggaccacggcccgccgcggggccccccagcccgaacgccg

SEQ ID NO: 252079 - RNA, 75 nt, Homo sapiens
cagaaaagcgcggaaaaaaggaagaagaacgaagggagagcggaaacaaaacaccacaagcccagccaaggacag

SEQ ID NO: 252080 - RNA, 41 nt, Homo sapiens
cccggagcaccgcggcagcgccaccagcccccgggccaaga

SEQ ID NO: 252081 - RNA, 85 nt, Homo sapiens
gcgaggcgacgggggaggccgagaaccgcagggacggccgagggacaagaacccaagaaacaggaaaaaacccaaaacaccaaaa

SEQ ID NO: 252082 - RNA, 82 nt, Homo sapiens
gacaagacgccccagaggcaaaaaccggagcagaaacgggagaaaggaaagaagaaggcaacaagcaaggaagacgaccaga

SEQ ID NO: 252083 - RNA, 93 nt, Homo sapiens
cgaggacggggcgccggcgccgccgcccccgggccgcggccgcaggccaggaccagccagcccaccggaccacacacacggggcagggcgggg

SEQ ID NO: 252084 - RNA, 72 nt, Homo sapiens
gcagacgggggcgcagcagccccgaggagggacgccgcccgccaggcccgagcagagaaagggggaggcgga

SEQ ID NO: 252085 - RNA, 79 nt, Homo sapiens
gggggaaaaacccggacggcacaccccaggaaccaggaaaggaaaagaaaccagcaaaaccagaagggagaaggccgag

SEQ ID NO: 252086 - RNA, 71 nt, Homo sapiens
gacggaagaccaagacaaaaggagaaaccaaggaacagccaggcacaaacaacagagcgggacaaaagaac

SEQ ID NO: 252087 - RNA, 61 nt, Homo sapiens
cagccaagccccccaacacgcaggagcggaccagaacgaggaaccccagagaggacagaag

SEQ ID NO: 252088 - RNA, 74 nt, Homo sapiens
cccagaaggaaacagagcgagagaagccaaagagggaacccccaccaagcaaaccaggagcaagacgacagagc

SEQ ID NO: 252089 - RNA, 77 nt, Homo sapiens
caagcaaaaacagcaccagccaggagaaggaaggagcaggaggccaagccagggggcaaaccaaccgcaggcagcgg

SEQ ID NO: 252090 - RNA, 71 nt, Homo sapiens
aagcacccaaggaaccacggcaaagaaaaggaggggcaagcagcgaggaagcaaacaagaagaaaagaaaa

SEQ ID NO: 252091 - RNA, 66 nt, Homo sapiens
ccgagagcgagaaacaaagccacccagccaagaagcggggggggagcggcagcggcagagagcaac

SEQ ID NO: 252092 - RNA, 60 nt, Homo sapiens
agagacagagaaccaacacccccacaaggacccccccaagccaggaccagaacagagaag

SEQ ID NO: 252093 - RNA, 75 nt, Homo sapiens
gcagaagcgcagcaggcacaaagaaggaggaaggaggccccagcaggaaacacgaaccacaaaagagagcagaaa

SEQ ID NO: 252094 - RNA, 69 nt, Homo sapiens
ccccagagggcgcaagcagagaaaagccacccccagaagcgagcccgcacccgccaggagaggaagaag

SEQ ID NO: 252095 - RNA, 55 nt, Homo sapiens
cgggagcggcgaagaggcaccggaggagacccgggccagccgccggaacccgaac

SEQ ID NO: 252096 - RNA, 78 nt, Homo sapiens
gcagggcggacgaccggaaagggccgacgccaccgccgagcccagaccggaacagacggggggccaacaaagaagcag

SEQ ID NO: 252097 - RNA, 81 nt, Homo sapiens
gagcaacaccgagagaggaggagccagacgacaagcacacacaggcgcgaaacggaaaaaggggacccacagcccggcgac

SEQ ID NO: 252098 - RNA, 74 nt, Homo sapiens
cgaggcgccgcacggggccgagggcagcccaaggaccaagggagaagagacccaggaggcagggcagaacccca

SEQ ID NO: 252099 - RNA, 81 nt, Homo sapiens
cggacgccggcccgcgcgcgcaccccgcggacgccacagcgcggcggagaacggaaaagcaccaggaagcagagaggaccg

SEQ ID NO: 252100 - RNA, 79 nt, Homo sapiens
gccagcccccggagcgccacacacgcccgcccgcccagggaaccaccagcaccaagggcggagaacggaaaagcaccag

SEQ ID NO: 252101 - RNA, 58 nt, Homo sapiens
gggaagggaaagcagaggaaggcagaagaaaaagagagacaagagagacaccccaacc

SEQ ID NO: 252102 - RNA, 78 nt, Homo sapiens
acggcaaagggcagcaaccaaaagccaggagccgggggggcgagcccgccgagagcgccaaggaggagacaacggggg

SEQ ID NO: 252103 - RNA, 39 nt, Homo sapiens
aggagggagccagcacagaccgggaacagccaggaggga

SEQ ID NO: 252104 - RNA, 67 nt, Homo sapiens
agggggccccaagcgaggcggcggaagaagagcaccggcgacaaaggacagccaccccgacacccga

SEQ ID NO: 252105 - RNA, 82 nt, Homo sapiens
cgagcaaggagcgggccgcgcggagccggagggcgggaggaacagacacgcggagcccccccgccaccagcccagccgaccc

SEQ ID NO: 252106 - RNA, 61 nt, Homo sapiens
aacagagcaaggcaagaaggcggaaagacccgccacaccgaagccgcagggcgaggccaca

SEQ ID NO: 252107 - RNA, 79 nt, Homo sapiens
caccgacaggaacagggaccacggggggaccccagggcggggcagccccgcccccaggacagcagcagcgacacagggc

SEQ ID NO: 252108 - RNA, 79 nt, Homo sapiens
ccagaggaccgagagaaaccagaagacaaggggacggcagcccaaagaaaacccagaggcccgcaaaacgagcgaacca

SEQ ID NO: 252109 - RNA, 81 nt, Homo sapiens
aagcgacgcaggcagaagcgagacggcaaggcaaccagcaccagcagagagaaggcaagagaaggcagggggcaggccaca

SEQ ID NO: 252110 - RNA, 98 nt, Homo sapiens
aaggacaagggaacgacagacacagcgcgggaggcgaaggcggcacgggagaggccaaaagaccaagggacagggaaaaaggcgccaaagcacagagc

SEQ ID NO: 252111 - RNA, 61 nt, Homo sapiens
caagagagaaccgaccaagacacccaggcggcgcagcagaaagcccacgcaaagaggacgg

SEQ ID NO: 252112 - RNA, 80 nt, Homo sapiens
caggacgagagccgcggaaagaaccggcccggaaccacgccagcaaagagcgaggggggggcaggacacgggcagcgcag

SEQ ID NO: 252113 - RNA, 79 nt, Homo sapiens
agggagaaacccaagagcaggaaaacagagaccacgcaggccaaaacagaagaggcaaagcccagccacagcagcagcc

SEQ ID NO: 252114 - RNA, 73 nt, Homo sapiens
aagagagcaagaaaaaccaacacaaacgacagaggaggcccaccaagccgagaacaccaggaaacagcccagg

SEQ ID NO: 252115 - RNA, 80 nt, Homo sapiens
gaccaaccagaaggccagacacgagcgaccggagaagagcaaccggacacagaaggggaaggaaaccccaagcagcagag

SEQ ID NO: 252116 - RNA, 78 nt, Homo sapiens
aggaaaaggaggaacgccggcccgagaaagcccgccagcagcccgccaaggaacccgcggggcagaccacaccagcac

SEQ ID NO: 252117 - RNA, 83 nt, Homo sapiens
gaaaggaggcaccaaagagcagagacaagagcacaagacccagaaaaaaaggagaaagaagagaagaagaaaacaaccagcag

SEQ ID NO: 252118 - RNA, 63 nt, Homo sapiens
gaaggacaccaagagcggaccgggccccgccccacagagagccgccagagaaggcagccccca

SEQ ID NO: 252119 - RNA, 66 nt, Homo sapiens
ggaccaagaaccaggcagaggccaagaaggaacgaaaaaccccggaagcagggacaggaacagcgc

SEQ ID NO: 252120 - RNA, 69 nt, Homo sapiens
ccaacagccacacacagccggcccgcagaccggcggaaaaaaggcccacccagagacacccaggaaacc

SEQ ID NO: 252121 - RNA, 79 nt, Homo sapiens
ggagcccagcgccacgacaggcggcagccaggaaccccgacagcagagacgacgcggcaagcagcggaagaggacgacg

SEQ ID NO: 252122 - RNA, 82 nt, Homo sapiens
gccagggcccggcccgaaaggagagccgaggagaaagcaaggacccagagccacacgaacgccccgaccacagggccaacac

SEQ ID NO: 252123 - RNA, 60 nt, Homo sapiens
gcgcgagcaacgccggaggacacccaaaggacggcgggaagagggggcagaaggacggag

SEQ ID NO: 252124 - RNA, 57 nt, Homo sapiens
gagaccggcagggcgggggggaaacagccaaggaacgaagagaaagggccagaagga

SEQ ID NO: 252125 - RNA, 68 nt, Homo sapiens
gacaaagaaggacagggaaaaccgacgaccggaagaggccaggaacaggagacagcggagaaagagcc

SEQ ID NO: 252126 - RNA, 80 nt, Homo sapiens
gccacgaccacccccggaccggcagagcgcggaggccgaaccccgaaggaaaacacaggccccacgggcccagaggggga

SEQ ID NO: 252127 - RNA, 73 nt, Homo sapiens
ggaagagggcggaggaacagcggggacaccaaaggagccgacccgagccacgccccagcaacacggagcagcc

SEQ ID NO: 252128 - RNA, 69 nt, Homo sapiens
ccaggcccggaccccaagaccaagcgcgccacgcgcggcgcgccggagggaagcggacacacaggacga

SEQ ID NO: 252129 - RNA, 73 nt, Homo sapiens
cgagggccgcacccccacacgcaggaaacacgaggggaaacacaaagaagacaccagaagggccagcaccacg

SEQ ID NO: 252130 - RNA, 77 nt, Homo sapiens
aggggcccagagacgggcacccagcagcgaagagcaaaggacccaccacgagaaacaagaggcagcacaggggaaga

SEQ ID NO: 252131 - RNA, 84 nt, Homo sapiens
agaacaccccgagcgaggccaacccaggaggaggaggaaaaggcgaggagggacgcgacagaaccgccccccccccaccccggg

SEQ ID NO: 252132 - RNA, 79 nt, Homo sapiens
gacccagcgccggcccccaggcgaagaagcgcagccgcaccggccaaggggccgggggcagccccccacccagcaccgc

SEQ ID NO: 252133 - RNA, 83 nt, Homo sapiens
caggggcgccaacccaaccggcccagggcacggaaggcagaggaccgcgcggaggcagcggggcggacccaaaggagacaaca

SEQ ID NO: 252134 - RNA, 97 nt, Homo sapiens
gccgaacagacgagaggaccaaagagagaacccagacaacagccccggaacagcgggaaaaacaggagaggaaacgggggcggacaccaagaaacca

SEQ ID NO: 252135 - RNA, 58 nt, Homo sapiens
cccgccgacccacaggccgacaagaaccccgcagccacccacagggaaagaccaggag

SEQ ID NO: 252136 - RNA, 76 nt, Homo sapiens
gcggcaaacagcacagccagcagaccagggacacccggagagggccagaaaaccagcgacacgaacccccagcgag

SEQ ID NO: 252137 - RNA, 69 nt, Homo sapiens
gagcgaggagcccggcgagaagaggagaggggaaggacaaccagagggaaaaaacaaaggcagcacggc

SEQ ID NO: 252138 - RNA, 88 nt, Homo sapiens
ggccggccaggaggcccaagacaccacagaagcccccgagcccaggggagcccagcgacgggaagaacagccagaaggcagaaagggg

SEQ ID NO: 252139 - RNA, 56 nt, Homo sapiens
ccagccggacggcggggccgggcccccggccgcaagcagagcagcagaggaaccgc

SEQ ID NO: 252140 - RNA, 79 nt, Homo sapiens
ccaggaagaaagacacaggacaacgaacgaaacggaacacggccaaagccccagaggacaagccagaagagacaacaag

SEQ ID NO: 252141 - RNA, 67 nt, Homo sapiens
ccgaacccagcacggcaaccgcgcggcaggccaggggaccgacaacggcaagcggagaagagcaagg

SEQ ID NO: 252142 - RNA, 84 nt, Homo sapiens
ggcacagggcccgcccacaggcagcagcacggcacagcacgccgaccagccggcgccaaagaccgcagccagaccacgcgagcc

SEQ ID NO: 252143 - RNA, 51 nt, Homo sapiens
cgcagggcgcccccggcacaacaaagggaaagcaggaaagaccggaaaagg

SEQ ID NO: 252144 - RNA, 62 nt, Homo sapiens
gagagagacagaacaggaaccccacacggacgccggaagagccacggcggggaggggccagc

SEQ ID NO: 252145 - RNA, 80 nt, Homo sapiens
agacggaaaggagggggcggggagaaagggacaacaagccaccaggagagaacgccgcgccgcgcgacaacggcccggca

SEQ ID NO: 252146 - RNA, 79 nt, Homo sapiens
ggcaacccagggccggcgcgcgccaccagacgggaagagcgcgcagggccagccacaaggcaagcacaagcgcacacca

SEQ ID NO: 252147 - RNA, 84 nt, Homo sapiens
ccccaaagacagagaagaaagcagagacaggccaagggcacagagcgaggaggacgaccgcagcccagaacccccaggacagac

SEQ ID NO: 252148 - RNA, 76 nt, Homo sapiens
gccaccagaagccgggaaagacaagcaccacggaggaggaccaggccaaggggaacaaggaccaaaccgcccggcg

SEQ ID NO: 252149 - RNA, 80 nt, Homo sapiens
caagccggaaaggccccgagagcaaccggcccccacgagacagcccaggcaaaaaagaaaaacaagcacacaagcaaaaa

SEQ ID NO: 252150 - RNA, 46 nt, Homo sapiens
acagaggggcgacgggcgacagaaccgaaaggacacaacgaccagc

SEQ ID NO: 252151 - RNA, 75 nt, Homo sapiens
cccgcgcccgcggccggggcacgggaagacacacaggacacagagaagggacgaggacggccaaacaagaggcac

SEQ ID NO: 252152 - RNA, 98 nt, Homo sapiens
caacacaaccacggccaccgggcaaacaacacgcaagaagaaccaccgccaggggggcggacgaagcaggacacaccgaacacgcacccgagccaccc

SEQ ID NO: 252153 - RNA, 76 nt, Homo sapiens
cagaagcaaccagacgccgaacacacgacaggcccgaggaaacccagaaaacagcgggcggccgagccgggaagcc

SEQ ID NO: 252154 - RNA, 52 nt, Homo sapiens
aaacagaaaaggaagaaagggacaaagagaggagcagcggaccagcaccacc

SEQ ID NO: 252155 - RNA, 64 nt, Homo sapiens
ccacaccagcaaaaagggcagcacagaaaagacaggacagcaaaagaaaaaaggaacaacgaga

SEQ ID NO: 252156 - RNA, 86 nt, Homo sapiens
aaaggccaagaggaacagaaaccgaagagaaaggccaacgagaacaagcacagccggacacaagagggcaagaaaggcgcgacggg

SEQ ID NO: 252157 - RNA, 81 nt, Homo sapiens
gccggagacagcgcgaccggacgggcagggagacagaagccaaacaggaggaggaagggaggggaagaaagcacgggaaaa

SEQ ID NO: 252158 - RNA, 80 nt, Homo sapiens
gaggaggaagcgagcagcccagacagcggccacccaagggcacagagcagaggacaccacaggaaggaggcgcagagaga

SEQ ID NO: 252159 - RNA, 80 nt, Homo sapiens
aaaacacaaaccgaaaccaaaacccccagcccagaaggacacacaccaaaccgaaaaggccacagccgggacaaaccgaa

SEQ ID NO: 252160 - RNA, 79 nt, Homo sapiens
cagaccaacgacaagaacaaagggaagagccacaaagggaaccaggcgaagaggaaaaaaggaagaaaagcagaacggg

SEQ ID NO: 252161 - RNA, 75 nt, Homo sapiens
cacacacaggagaccccaaagaaggcccgcagaccgaagaggcgcagcagccccagccaggcaggaaacaccccc

SEQ ID NO: 252162 - RNA, 85 nt, Homo sapiens
gcgcgggccaggggaccggaaggcgcgggcaggagccggcgaggagcaccccccgccggaaagaaacgaaggccagaagaggaga

SEQ ID NO: 252163 - RNA, 75 nt, Homo sapiens
gagccaagaaaacaacaaacaggggaaggacacaaaagaaagcgacaaggaacaaggaaagggacaacagagggg

SEQ ID NO: 252164 - RNA, 84 nt, Homo sapiens
ggcgccgcggaccgcgcggcccccgacggggcccccaggaggagcaccgaggcacagcccaggcccggggggcaacggcacgcg

SEQ ID NO: 252165 - RNA, 67 nt, Homo sapiens
agcagacggccgaggaaagggggcgaggaagagacaggcgggggagaagaagcagggccaaacgcag

SEQ ID NO: 252166 - RNA, 79 nt, Homo sapiens
cgggccggagccagggaggcggcggcgggaacgagggcgagcagaggacgacaggccgggagacacaccggcccgagga

SEQ ID NO: 252167 - RNA, 85 nt, Homo sapiens
acgccgggcaagagaccgacggcggagcaccgccccggcagaagcggcagcaaagcccgaaaaagcccaagacagcagaagcaga

SEQ ID NO: 252168 - RNA, 71 nt, Homo sapiens
ggacagagggaacgaagaaaaggcagccacgcaggacgggcagggagccggagacaaccagaagacgacag

SEQ ID NO: 252169 - RNA, 79 nt, Homo sapiens
caacaccacaaaaccacagccaagacgacacgggacccagcgaggaaagaggcacgggaagagcccaacccgagaaacc

SEQ ID NO: 252170 - RNA, 59 nt, Homo sapiens
ggcgaacaggaacggagccaaccgcccaggaaggacaaagccacccaggcacgggaaag

SEQ ID NO: 252171 - RNA, 63 nt, Homo sapiens
cccggaggaggcgaagggagggacagagcacgccgaggccgggcccaagaagcacgaagcggg

SEQ ID NO: 252172 - RNA, 55 nt, Homo sapiens
gggacgcacacggcaccaaaccgcagaaccggccgaaaagcacaaacagcaagaa

SEQ ID NO: 252173 - RNA, 65 nt, Homo sapiens
caagcggcgacacacgacggacgaagagagaaaggcagggcaccccaccacagcgacaaagaccc

SEQ ID NO: 252174 - RNA, 68 nt, Homo sapiens
gggcgccgagcgaacgcgcaacagggccgcacgcaagggacacaagggcgcaaccaaagcaccagacc

SEQ ID NO: 252175 - RNA, 73 nt, Homo sapiens
gaaccgaccgagagcgcagacccgaaagaagacgcgggaaaacccagaaacagaaagaaaagaaaagaaggcc

SEQ ID NO: 252176 - RNA, 68 nt, Homo sapiens
gagccgggaggaacggcccggaaacaggaggacgggccagaagacagcccaggaggccgaggacgagg

SEQ ID NO: 252177 - RNA, 70 nt, Homo sapiens
agggccaccccacagacggagcagacgagccaccgagcccgggagccggcgaaggaggacggggcaggcc

SEQ ID NO: 252178 - RNA, 38 nt, Homo sapiens
ggcaggggaaaagagacgaggcgcggcggcgagaagcc

SEQ ID NO: 252179 - RNA, 59 nt, Homo sapiens
cgaggggagaagagcccagagagccggaaccgggaaccgaaaacaaagcagcccgaaga

SEQ ID NO: 252180 - RNA, 53 nt, Homo sapiens
accacaacgccgcggacgaccgcacgggcaggcgacagcagcaaacaagggcg

SEQ ID NO: 252181 - RNA, 84 nt, Homo sapiens
cgggagcgcgcccgccgagcgcaacagcggcgggcggggcaccccagacaggacgacacaaacacagcgaagcaaacagaggcc

SEQ ID NO: 252182 - RNA, 78 nt, Homo sapiens
cgcacccccggccggaggcaccagcggacccggcagcaaccccaacaaacgccagaggcagccccccccgggagacac

SEQ ID NO: 252183 - RNA, 79 nt, Homo sapiens
cagcgaacaccaggcggagccaggcaaccgagaggccccggaccccagccaaaaaaacccgcagaggaaagagcgaaaa

SEQ ID NO: 252184 - RNA, 82 nt, Homo sapiens
gaacagagggaggagacagagaggggaaagaggcagagaagccaagacaggcaaaggcagcaggcagaaggagcggaaggaa

SEQ ID NO: 252185 - RNA, 74 nt, Homo sapiens
gagcccccacgacccgccaggaacagagacagacccgggggcccccaaggagagggaagaagccaggcagaagc

SEQ ID NO: 252186 - RNA, 62 nt, Homo sapiens
aaggagacgccccacgaggcccaaaccgccaaggaaacagcaccaccgccgcccggagcacg

SEQ ID NO: 252187 - RNA, 80 nt, Homo sapiens
ggcgccagacacggggccgcacgggacgccggcacgcgaagggccgcaccgcaagaggagcaggagcggccgcggagcag

SEQ ID NO: 252188 - RNA, 83 nt, Homo sapiens
ggggccgagccgccccagccagaccagcgccggaaccggggagaccacgacgcgccccgggcgccagagccgcagcccagcgc

SEQ ID NO: 252189 - RNA, 72 nt, Homo sapiens
aggacgaaacccacacggaggagagaggcacaaacaccaggaagagccacggccggaacaggcggcgcccgg

SEQ ID NO: 252190 - RNA, 64 nt, Homo sapiens
ggagcccagccccgccggcagcccaagggcaagaaggagcccgcagggccgccaccagcacagg

SEQ ID NO: 252191 - RNA, 84 nt, Homo sapiens
gcgaagccgaaaaagcgcccgagacgggcccgccgaaagccaaacagaggcagaagcaaccaggaacggccagcacccgcaacc

SEQ ID NO: 252192 - RNA, 82 nt, Homo sapiens
aaccagacgcccgggcagacaagacagacagaaggcaagcagcaaggaacaaggaaagagcgaaggccaccacagggagcac

SEQ ID NO: 252193 - RNA, 85 nt, Homo sapiens
ccggccccggcccacaggggggggcaaacccgagagaacggaacaccggaaacgccaggccacaagggagcaaacgaaaagccac

SEQ ID NO: 252194 - RNA, 54 nt, Homo sapiens
ccccgcaccaacgagaagagaggcaacccaaggagaaccaaggaacaccagaaa

SEQ ID NO: 252195 - RNA, 36 nt, Homo sapiens
gcaagagaaggcaccaagagaggcgcgaacagggcc

SEQ ID NO: 252196 - RNA, 65 nt, Homo sapiens
cgcgaaagagaaacaaagaggaagggaggaacaagccaccgcacgagggcccaagacccaaggaa

SEQ ID NO: 252197 - RNA, 81 nt, Homo sapiens
cgccaacaagaaccagcacacccacggagcggggcacaaagcccccgggggaccgagcaggacaccagaggacgcccggca

SEQ ID NO: 252198 - RNA, 83 nt, Homo sapiens
ccgcgcaccgcccgccccgcaccgccaaagcggacgccggccaccacgaaggcgacacagaagacgagcgacaaaagcacgga

SEQ ID NO: 252199 - RNA, 74 nt, Homo sapiens
gaacccccgacaagccccaccggcagcaacgggagcgagacccacagaggaccaggggccaaagaagaggccga

SEQ ID NO: 252200 - RNA, 91 nt, Homo sapiens
caagcgcagcggcccgcgccgcgggcgaacgagaaaacaccagcacggaaaaaggggaaaccgaaccggaccagagaaggagagcgagcgg

SEQ ID NO: 252201 - RNA, 79 nt, Homo sapiens
agaaacagaggagggaggcacaaaaagagagggccacgagagagaaagacacaggaacaaccaggaagcaagagaaaaa

SEQ ID NO: 252202 - RNA, 43 nt, Homo sapiens
acaggggcaccaccacgcccaggagaaccacagagagccgagg

SEQ ID NO: 252203 - RNA, 79 nt, Homo sapiens
gagaagcggggaccgcaggccaagccggaaaggagggaggaagaggcgcggcaagggcgcggcaagaaaaccggggccg

SEQ ID NO: 252204 - RNA, 75 nt, Homo sapiens
caacaaccagaaaaacaacaccacagacaagcaggagccggggaaacgcaggagcacggaggggagaagggggag

SEQ ID NO: 252205 - RNA, 78 nt, Homo sapiens
cgccccaggccaagagggacccacccggcggacccaaagacaggaccacgcaccagcagagaaggaaagcaaaccgaa

SEQ ID NO: 252206 - RNA, 80 nt, Homo sapiens
ggccaagccaaggaaaccacccacaggagacccccgacacacaggagaaaaaacgacagcccagacaggaaagaagaacc

SEQ ID NO: 252207 - RNA, 84 nt, Homo sapiens
cgccgccccgccgcggcggggacgcagggaaccacggagaccagaccgcgccacaggacaagaaggccaacaccgcaacagcgc

SEQ ID NO: 252208 - RNA, 34 nt, Homo sapiens
gaagggcggcggaccgggaccgcccgaggacggc

SEQ ID NO: 252209 - RNA, 72 nt, Homo sapiens
ggaccacaaaaggccagaggcagagcaacaagcagccgaggcgagcagccccggagcaagaagccaccaaag

SEQ ID NO: 252210 - RNA, 49 nt, Homo sapiens
ggaacagggccacagcaagcccacagcacaggcggccggggccccacaa

SEQ ID NO: 252211 - RNA, 81 nt, Homo sapiens
gaaggccagcagcgggcgcaggaaggccaccgacaggaagagggaggccggccccccgacagaccccgcacgaggccaccc

SEQ ID NO: 252212 - RNA, 79 nt, Homo sapiens
cacaacaacacggagacagagccgaaggccggcagaagcacaggccagaccggggcgcccagcagagaaaacggacgaa

SEQ ID NO: 252213 - RNA, 71 nt, Homo sapiens
acgggggggaaaaggcagccaggacagcgaaacggaacccagccagcggagggggggcccaggggagcgcg

SEQ ID NO: 252214 - RNA, 75 nt, Homo sapiens
ggcgcgggacgcgcgcgggcacccacggagccccggggcgggggggccccagcccggccgaacgggcgcacgaca

SEQ ID NO: 252215 - RNA, 55 nt, Homo sapiens
aaccagagccgcaacaggaaaccgaagcgggcacaacgggggaagccccagcagc

SEQ ID NO: 252216 - RNA, 87 nt, Homo sapiens
ggaggaacggcccggaaacaggaggacccacccgaagggccccccaagcccagggaccgcagaggacggggaccagcaagcaacccc

SEQ ID NO: 252217 - RNA, 86 nt, Homo sapiens
cgcccccgggaggccggcgccgcagcccgggcccaggccccggcagcgccgggacaagacaagccgagaccaccaggagcagagcg

SEQ ID NO: 252218 - RNA, 79 nt, Homo sapiens
ccagcgacgcaccagcaagacggcaggcgagagccgacccaggccgccggccccacagggcccggcgagcgaccgccgg

SEQ ID NO: 252219 - RNA, 79 nt, Homo sapiens
gaccaagaaccaggggggcaacaaagccaaaggagaaacggcaaggaaggaacgaagcaaagaagcgaaaacgggggag

SEQ ID NO: 252220 - RNA, 77 nt, Homo sapiens
aaaaaagaaaaacgccaccagccccagcggaggacacagcagccccagcacgaacagaaaagaaagggcgcacagcg

SEQ ID NO: 252221 - RNA, 73 nt, Homo sapiens
ggagagacagccgacaccgaaggagccagcgccccgaagaaggcgcaagcgaccagccagggagccgcccacg

SEQ ID NO: 252222 - RNA, 63 nt, Homo sapiens
aggcagcgcccagcagcgcagggaccgaggaacccgggagccaggaaggaaggagcgcccaga

SEQ ID NO: 252223 - RNA, 55 nt, Homo sapiens
gcgggcacccaccccgagaacgggacccaacagggaaaagacacacacaaaccca

SEQ ID NO: 252224 - RNA, 78 nt, Homo sapiens
ccggaggaaacaggaacacccaagacaaaaaggcaaaacccacgacaagaaggcaccaaagccaacaggcagaccaga

SEQ ID NO: 252225 - RNA, 53 nt, Homo sapiens
gggagaagaggaagcccgacaacgaagggacaacagcagcacagagaggggag

SEQ ID NO: 252226 - RNA, 64 nt, Homo sapiens
ggaagcagggaccaggccaagccagagagagacacgggggaaacccaaacagagaagcccaaga

SEQ ID NO: 252227 - RNA, 78 nt, Homo sapiens
ccccggcgcaccgacggaccgggaaggagcacccaggaccaccagaacggaccaagacgagaaaccggcccgacagag

SEQ ID NO: 252228 - RNA, 82 nt, Homo sapiens
gacacacccacgccccagacaccaggcggcacagggagaacacagggccccaccgcgccccacagaaaacgagcaaagacaa

SEQ ID NO: 252229 - RNA, 62 nt, Homo sapiens
cacacggaggcgggccagggccagcgcgggggacgaccagcccacggggccagcagagcgag

SEQ ID NO: 252230 - RNA, 82 nt, Homo sapiens
cagccgcaagacccgccacaagcaacgcgggaagagaagcagaccgaaaagggcggaaaaggaccaaggcccgcaaaagggc

SEQ ID NO: 252231 - RNA, 77 nt, Homo sapiens
caccggaaagaccgacgcagaagagaagcgagaacagccagagagacagaccaggacacaggcaccagagcaaccca

SEQ ID NO: 252232 - RNA, 65 nt, Homo sapiens
aggaggagacaccacagcacagcacaccagggcaggcgaggcaaaggacacagaagaaaggacag

SEQ ID NO: 252233 - RNA, 54 nt, Homo sapiens
ggcggagcagaccaccggccgcaggggaggaaccggccaagaagggcgcaggca

SEQ ID NO: 252234 - RNA, 77 nt, Homo sapiens
gaggagacggggcagacaacggagcccgggagacgccggggcccggcgccaccaccggggagccagagcaagaggcc

SEQ ID NO: 252235 - RNA, 71 nt, Homo sapiens
aagcacaaaaccaaccacaaggcagcccaggacccaagcaagaagaaggccccagcaccgcccaaggcagc

SEQ ID NO: 252236 - RNA, 58 nt, Homo sapiens
agcaaagagggaccgaccggccagggaacaggcaggaaaacgacccaaaacagccacc

SEQ ID NO: 252237 - RNA, 71 nt, Homo sapiens
cacagagggacccggacaaccagaggcagccagcagggggagggcgacagccggccaagaagcaaggaaag

SEQ ID NO: 252238 - RNA, 73 nt, Homo sapiens
ggccggccaaaaacagaagggagggccaccacgggccggacgaggacaaaggaacagcacagggcgcaacaag

SEQ ID NO: 252239 - RNA, 74 nt, Homo sapiens
gggaggcgccccagggacgagaggaagaccgaaggacaagggggagacggaggaaccgaggagaagaagaagag

SEQ ID NO: 252240 - RNA, 79 nt, Homo sapiens
cccggcccggagcccccagcgcagcggccgcggacagccagcacaaaaaaacaaaacgagaacacggaagacacgcgca

SEQ ID NO: 252241 - RNA, 79 nt, Homo sapiens
aggaaggggggggcgacaacggcaccggggccagggcccagcagcagcccacggggccagcggaggaaaaggggagcgc

SEQ ID NO: 252242 - RNA, 74 nt, Homo sapiens
ccaggaccacggagacggggggaggagagaaagggcaacccacgagagaacagaggagcagacaagggcccaca

SEQ ID NO: 252243 - RNA, 56 nt, Homo sapiens
ggcgacccgcagcccggcgcggagccaaaagcggagaacgaacaagaaaagccaaa

SEQ ID NO: 252244 - RNA, 64 nt, Homo sapiens
gggcgaggcggacgcgcggcgcgcagagggcgaagacaggacggcccaggcagacacggaggag

SEQ ID NO: 252245 - RNA, 82 nt, Homo sapiens
ggacaccaacgagcgaagcagaaacagaccaccccaggaaaagagaaccgccgaaaagacaagaacaaaccgaacccgagag

SEQ ID NO: 252246 - RNA, 79 nt, Homo sapiens
gagagcccgaacggggcaaaaaggcgaaggacaggagaaacaggggccaaaaaaccaaaggagaagaaaaccacagaag

SEQ ID NO: 252247 - RNA, 81 nt, Homo sapiens
agccgcccgcgggcagcaggaaaggggccaaggccagcgggagcccccgaccccaggagggcaagaccaagccacagcgac

SEQ ID NO: 252248 - RNA, 77 nt, Homo sapiens
aacaggacgaaaaaagggcaagaagccagaagcagaaaaagggacagggcaggcgaaggaacgaggaaaaacggaac

SEQ ID NO: 252249 - RNA, 78 nt, Homo sapiens
cccccagcgcgcgcccccagccagccacgcgggccgcccgacggcggccaccggcacgcagcacgggggcaggggccg

SEQ ID NO: 252250 - RNA, 60 nt, Homo sapiens
ggcccgcgcgccgagggcgaggcggacgcgcggcgcgcagggggcaaggcggcccggcac

SEQ ID NO: 252251 - RNA, 80 nt, Homo sapiens
ggaaacaggaggaagaacccaagccaaagcccagggaagcgggagaggccacccgcccacgagcggaagaaccagcagaa

SEQ ID NO: 252252 - RNA, 79 nt, Homo sapiens
gccccgagagcaaggacacaggggccacacagccagcagccccccaaggcccagccagcgcaggaacagcagcaagacc

SEQ ID NO: 252253 - RNA, 34 nt, Homo sapiens
ccaccacagcagaggcagcacaagggccgaacac

SEQ ID NO: 252254 - RNA, 75 nt, Homo sapiens
cgcacaggaaacgagagcgcagaacccgagcaagagaaaggagagagaacagcgacgcgggagccggacaccacg

SEQ ID NO: 252255 - RNA, 74 nt, Homo sapiens
cgccggccggagcagcagcccgagagcaagaaaggagcaggcagagcaaggaaacaagagggcgagcaacagca

SEQ ID NO: 252256 - RNA, 49 nt, Homo sapiens
aaccggcagaaaaacaccagagccacccagaggacagcaaggggaggga

SEQ ID NO: 252257 - RNA, 78 nt, Homo sapiens
ggaacccgaggaaaaacgacagccagaccccaccgagcccccccgccccgggcccagcccgccggccaggggccagcc

SEQ ID NO: 252258 - RNA, 52 nt, Homo sapiens
ccggacccccagaagaagaggggaacagcaaggcaccagcagaacagacacc

SEQ ID NO: 252259 - RNA, 75 nt, Homo sapiens
ggcagaggcaacccggaggacacaggaccagacaaacccacaagcgaaagaacacgagaagaagaacaggacgaa

SEQ ID NO: 252260 - RNA, 82 nt, Homo sapiens
caacaccgcgaggagggggaagcccacggcggacgcaaggaaacaaagagccccgggaaaagaaaaaaaacgccccaaacgg

SEQ ID NO: 252261 - RNA, 84 nt, Homo sapiens
ccccgccgcgccgcgcccaaccgcccccccccagaacgcggggagagagaaggcccaaaagccaggggccgacggacaagagga

SEQ ID NO: 252262 - RNA, 37 nt, Homo sapiens
gcaaaagccaggaaccaggaccagagaagacacacaa

SEQ ID NO: 252263 - RNA, 80 nt, Homo sapiens
cagcccggagggagcgaggagcgcccgcgggacaggaagaaacgaggccagacaagggacaggcaagggaggacagggcc

SEQ ID NO: 252264 - RNA, 78 nt, Homo sapiens
ccaggccagggcagaggcgaagggcgggggcgagggcccgggacagcgcacccacacagcaggaaaagcccaggcggg

SEQ ID NO: 252265 - RNA, 75 nt, Homo sapiens
caacaaacagaagaagaggccacggaaaggagaaagaccaagacagccaccagccgggaacacaggggacaagga

SEQ ID NO: 252266 - RNA, 99 nt, Homo sapiens
cacacagaagaagcccagagagcaccccagcgaggcccacagaaaagccacaacccagaccccccaggcgccccgccgccgcacagcccccaagacgaa

SEQ ID NO: 252267 - RNA, 82 nt, Homo sapiens
ggaagcgcagacccgcaaaggaaagaggcagaaggccagaagggcgaagaagaaggaaaaaaggccacgccacagaaaaaac

SEQ ID NO: 252268 - RNA, 66 nt, Homo sapiens
agaagccaccacaaaagcgaaagggcacaccacagccggacgagccgcaagacggccgggccgacc

SEQ ID NO: 252269 - RNA, 57 nt, Homo sapiens
acgacaaccaggggcacgagagacggcaggaggcaccaccacggaccggacacccag

SEQ ID NO: 252270 - RNA, 63 nt, Homo sapiens
gacaagccaaacggcaaggaacacagaggccaagaaaaccagaggacaccaccgggcacgccg

SEQ ID NO: 252271 - RNA, 77 nt, Homo sapiens
cgcagccagaggagccgccgcagagccccccgcccccgggcgaggggcacccccagcaggacagcacacccaaccag

SEQ ID NO: 252272 - RNA, 71 nt, Homo sapiens
gcccaaggagcgcgggacgaaccgccgacgcaccccagggaagcaagagaagccgacagaccacccaggaa

SEQ ID NO: 252273 - RNA, 71 nt, Homo sapiens
ccgcaagccagcggcccgggagccccgcaccaggacacacgcgacgggggagagccaagggcggggacacc

SEQ ID NO: 252274 - RNA, 82 nt, Homo sapiens
ggagcgagccgccgccaagagccggccacagaggccggaaaagccccaaacgcgccaacgaaaccccgaaccaaacagagcc

SEQ ID NO: 252275 - RNA, 76 nt, Homo sapiens
gcccccgggggagccggcggcggaccccgccgaccagagacaccaggcgccgagaaggccagcagagaaacaggca

SEQ ID NO: 252276 - RNA, 74 nt, Homo sapiens
agacaaaacagaggagaccagaccagaagccccgaaaagccaccccccggcaagacccaaggcaaccgagcgga

SEQ ID NO: 252277 - RNA, 74 nt, Homo sapiens
cgacacggcgggacacacaaagggacgcaccgaagaaagaaaacagcccagacaaacgagagggggccggggcg

SEQ ID NO: 252278 - RNA, 82 nt, Homo sapiens
ccccagcccccccgcagagcagccccggaaggaggccgccacagccacagagaagaaccgcaaaggaaaacagccacaggag

SEQ ID NO: 252279 - RNA, 83 nt, Homo sapiens
cagggccgagcaccggagaaaacacaaacccaggagcaccacggcaaaagcagaccggaaaacccaccggcaagaccacaccc

SEQ ID NO: 252280 - RNA, 51 nt, Homo sapiens
gcaagcgggagacacgagaaagggagaaaacgggccggaggaaaagggcgg

SEQ ID NO: 252281 - RNA, 60 nt, Homo sapiens
gaaggcagccgagcaccgagccagcccaggaaaaggagagccaggagacgacaaggcggg

SEQ ID NO: 252282 - RNA, 77 nt, Homo sapiens
ccaacaccgcgaggagggggaagcccacggcggacgcaaggaacaggaaaaagggcaagaagcaccaaaaggaagag

SEQ ID NO: 252283 - RNA, 74 nt, Homo sapiens
acggccgaaaggagagaggcagcgaaaggaagcagggcaagaacccgccacacaaggcgaacagagggcagcag

SEQ ID NO: 252284 - RNA, 82 nt, Homo sapiens
accgaagaccaccagagccggaccaggagaacggcggcggggcagcaagccacgggcagcgcagagggaccaaagggccacg

SEQ ID NO: 252285 - RNA, 43 nt, Homo sapiens
ggacgccggggagacgcaggcgaggcggaggcaaggccgaccg

SEQ ID NO: 252286 - RNA, 95 nt, Homo sapiens
gagaaaacaaagcccccagcgcagcagaggaaggaggcgacagcgccggagcagaacgccaaaagacgaacacaaagggaaagaggagaggcacc

SEQ ID NO: 252287 - RNA, 74 nt, Homo sapiens
gggagccacacgcccagcagccaccaacacccaaaggaagaagacggcacgggacccccagcacaggcagcagg

SEQ ID NO: 252288 - RNA, 82 nt, Homo sapiens
cccggcgaggccaaggccccaggacaagcggacgagaaccaccaccgaccaggcaccggagaccagagcaagggcaagacgg

SEQ ID NO: 252289 - RNA, 50 nt, Homo sapiens
gccggggcggaacagggcgcacacccgcacgcgacgagagaacagccccc

SEQ ID NO: 252290 - RNA, 73 nt, Homo sapiens
ggaccggcgccagaccgacggcgcccagggccacaaaggagaacacgagagacacaagaaggccaacggcaag

SEQ ID NO: 252291 - RNA, 35 nt, Homo sapiens
cgaagggaaagcccagaacaagagaagaaaccaga

SEQ ID NO: 252292 - RNA, 72 nt, Homo sapiens
cggccccgcgcgcaaggaagaaacccccagccgacgcccgcgccccccagcaagccacgcaggaaccccggg

SEQ ID NO: 252293 - RNA, 70 nt, Homo sapiens
caagagaaaacgagggcccgagaaggcacccgacaggcaccgccaaggccagagcacagaaccggaaacg

SEQ ID NO: 252294 - RNA, 70 nt, Homo sapiens
acaagacagcgcaaggcagcagcaggcgcaaaaacgaacccacaaccgaacgacggacgggaacaaagaa

SEQ ID NO: 252295 - RNA, 84 nt, Homo sapiens
cgcgcgaagcggccaaagccgcccagacggccaccggcgggaggaacaaaaggccaaggaagcacgggaagaacagaaaagaga

SEQ ID NO: 252296 - RNA, 76 nt, Homo sapiens
ggaacgggagaagaggcaaagaaacaccaagcggagcccggcacgggcaaacagagcaggcagggaaccgccaagg

SEQ ID NO: 252297 - RNA, 68 nt, Homo sapiens
gggacgcgggaagaacgccgggagaggcggcggcaggaaccagaacccggcgaaagcaaaagcagagc

SEQ ID NO: 252298 - RNA, 32 nt, Homo sapiens
cagaaccagacaccagcggggaggaccaaggg

SEQ ID NO: 252299 - RNA, 81 nt, Homo sapiens
cgacaaacgggagccaagaaaacccgcagcccaaagggcagaagaagaagaagacgcaagacggcagggggcccacacccc

SEQ ID NO: 252300 - RNA, 74 nt, Homo sapiens
agccagagcgggaggacgacgagagagagagacaagagagacaccccaaccgacaaagagcaccagacagccgg

SEQ ID NO: 252301 - RNA, 61 nt, Homo sapiens
gaacggaagggcacagcagcgcgcagcccgggcgcaggccagccggcggcacccccagacc

SEQ ID NO: 252302 - RNA, 54 nt, Homo sapiens
agcaaagaaagcgccccaaaagacaggcccaccgaagaagaaggagccccccga

SEQ ID NO: 252303 - RNA, 74 nt, Homo sapiens
acagcaggaccaagcgccaccaggcacacacggcagcgcagggccggagcgagggagagcaggaacacagagag

SEQ ID NO: 252304 - RNA, 83 nt, Homo sapiens
aacgcagaaaaggaaaggaaagaagaaaaacaagaccacacacaagcaagaacggcagcgagagcccagagaagggaagaaag

SEQ ID NO: 252305 - RNA, 72 nt, Homo sapiens
aacccgcgacaccgcgagggacaaagaccgaaagggaaaggccagacagcgcagcagccgccagcacgcaac

SEQ ID NO: 252306 - RNA, 80 nt, Homo sapiens
gggagcagacgcaccacccccccgccggggagggaagaagcccccagccgccgggcgaagacagagacgccacaggaaag

SEQ ID NO: 252307 - RNA, 79 nt, Homo sapiens
gaggcggagcccgcagaccgcagaaggccggagacaccagcagcaggcggacaccgaccgcaggaaggaggaggaggag

SEQ ID NO: 252308 - RNA, 72 nt, Homo sapiens
ccagagggcggcagcggcaccacggggacgcaaagaggcgggagcaccagacagcgacagacgcaaacacga

SEQ ID NO: 252309 - RNA, 61 nt, Homo sapiens
aagagccaccccacacaggccacagacacaaggccagaccacaggaggccgagcaaagcag

SEQ ID NO: 252310 - RNA, 85 nt, Homo sapiens
cccgcgcagacacggaccgcgggccagccgccaaagaccccgccgcgcaagacgcgagcaaaaagagaaaacaaagaagcaaagc

SEQ ID NO: 252311 - RNA, 73 nt, Homo sapiens
agacgcagaacgggcagagaccgcaggaagaagcgaagaggcaaaggcagccgagcaccacgacggagcaaga

SEQ ID NO: 252312 - RNA, 74 nt, Homo sapiens
caagaagccccccacacacaggaggagcggccgcagaagggcgcggcccgcccgcccggacgagccggcccgag

SEQ ID NO: 252313 - RNA, 83 nt, Homo sapiens
ccaggcccgagcgccaggaggaggaagaccgaccgccgccgcgcaccgcaacccgccacaagaccaaaaaaaaaagagccaac

SEQ ID NO: 252314 - RNA, 73 nt, Homo sapiens
ggagagaaggccagcgacagccgggaggagggccgcgcgacacgcacggagccagccgcgcacggggaagaag

SEQ ID NO: 252315 - RNA, 76 nt, Homo sapiens
agaacaagaacacccgccagcagaggcggagaagaacccaaccaaaaccaggcggcaaccccggggcgacaaaaag

SEQ ID NO: 252316 - RNA, 74 nt, Homo sapiens
gcggaagcacagcacggacggagaacacggagagcccgggaccaaggcagcaagggacggggggcaccccgccc

SEQ ID NO: 252317 - RNA, 77 nt, Homo sapiens
aaggggcgcgcggccccgccgccccagcccgccccccgggccgaacaaggacaaccggaaccgcgaggacaggagaa

SEQ ID NO: 252318 - RNA, 73 nt, Homo sapiens
acaccaccagaaggcgcggacagaaaggcagacggaacaagacccgcggagaaccacgaaggacccacagggg

SEQ ID NO: 252319 - RNA, 74 nt, Homo sapiens
agcgagggccacacaggagcccggacggcacagggccacagagaagaaccgcaaaggaaaacagccacaggagc

SEQ ID NO: 252320 - RNA, 72 nt, Homo sapiens
aaaaccgcaagaaaccaggcgggaaacaggggacagaaagcagcccggggcaaaacggacaacgagaacggc

SEQ ID NO: 252321 - RNA, 52 nt, Homo sapiens
cagcccccgagggcgggacacaggcccgggaccacgcccgcaagcgacaggc

SEQ ID NO: 252322 - RNA, 81 nt, Homo sapiens
gggaccagagacgaagaccacgccggccgcgaccaaggaagcaccaaaagggaaggcccacaagaaaacaaaaacacaaaa

SEQ ID NO: 252323 - RNA, 84 nt, Homo sapiens
cgaacaagaagaggaagaaagaggaaggagaaacaaaccagccgaaaagaagacgcaagggcgaaaaggaaacacacaaaaaaa

SEQ ID NO: 252324 - RNA, 72 nt, Homo sapiens
gaaaaggcacagaacaacaacaggcacaaagagagaaggaacacccacagggcagacagagaaagaacacaa

SEQ ID NO: 252325 - RNA, 79 nt, Homo sapiens
gaaggaccaagaaccagagagacaagagagacaccccaaccgacaaagagcaccagacagccgggaacgacccccacga

SEQ ID NO: 252326 - RNA, 83 nt, Homo sapiens
cggccccagcaacacagcaccgggaaagcagagggagaacaaagaggaccaagcaacaaaagaagaagcggagccacaggggc

SEQ ID NO: 252327 - RNA, 46 nt, Homo sapiens
gggaggagagagggagagccaaagaagaagacccaagaacggaacg

SEQ ID NO: 252328 - RNA, 75 nt, Homo sapiens
acaaggagcagagacaaaaccaagccaaacacaagcagaaggagcgaagaagaggggaagggggccagacaacca

SEQ ID NO: 252329 - RNA, 76 nt, Homo sapiens
gccgcagcccgaacagcccacagaacgaacgaagggccacccaagcgggcccagaccgcaggacggcgaccccacc

SEQ ID NO: 252330 - RNA, 82 nt, Homo sapiens
accccaacgcccaccaaagaggaaagcgaggaggagcgagcgcgagagaacaagcacaagcccggcggagcccaccaccacg

SEQ ID NO: 252331 - RNA, 74 nt, Homo sapiens
gagggcgaggaggacccaccaacaggcacgcgagaaggggagggggagaaagaagaggaagaagccacaggcaa

SEQ ID NO: 252332 - RNA, 77 nt, Homo sapiens
ggccagcgccggaaaccaacaaaccccggaaagggacagggcagcggccgagagcccgagaagaggccgcccggggc

SEQ ID NO: 252333 - RNA, 82 nt, Homo sapiens
gaccccggcacaagacccgcccggacccagagaagccaagcccggacagacgggagacacagaaaacccggcaaccaagaag

SEQ ID NO: 252334 - RNA, 60 nt, Homo sapiens
cgaggggaagacgaggcacaccgcaagaaggaaaagccgcgcggcccggaggaggcaccc

SEQ ID NO: 252335 - RNA, 73 nt, Homo sapiens
aacagcggccgggaacgaccgaaacaccaggacagggcagaccgccagcagcacagcaagccacagagagggc

SEQ ID NO: 252336 - RNA, 80 nt, Homo sapiens
caaaccagacggggacccggcacgagcagccgggggaagcagcggcagaaccacagcacagaagaccagcaggccgcaaa

SEQ ID NO: 252337 - RNA, 51 nt, Homo sapiens
accggaaggcaaggaacgagccaaaaaggggaaggacaagcaaggggccaa

SEQ ID NO: 252338 - RNA, 71 nt, Homo sapiens
ccccggcgggcccgaggcggcgagagaggcaggcggagccgaccgggccaggccagggcgacagacaagaa

SEQ ID NO: 252339 - RNA, 63 nt, Homo sapiens
gagaaaaacagaccaaaaacagcaggcgcggccagccagaaaggagccacgccccagaacggg

SEQ ID NO: 252340 - RNA, 70 nt, Homo sapiens
cagagaaaccagacggcagcgcgccagaaaacaccggaagcgcgacaaaaaggagcgggggggacagggg

SEQ ID NO: 252341 - RNA, 73 nt, Homo sapiens
aagaagccaagagagcagcgacgagaaggagacacaccgaggaagagggaccaggggagacggccaagcaagc

SEQ ID NO: 252342 - RNA, 79 nt, Homo sapiens
aagaggccagccccccgagggcaacgagaaagagacgaaccccaagacacaggaagggggggcaaaaagacagaagccc

SEQ ID NO: 252343 - RNA, 35 nt, Homo sapiens
caagagagaccaggggcggagggaagcaggccagc

SEQ ID NO: 252344 - RNA, 76 nt, Homo sapiens
aaagagagaaccggagagcacccaacagaaacagaacgacagcccgcaccgacgccggcggccagccagagagcac

SEQ ID NO: 252345 - RNA, 74 nt, Homo sapiens
cccccccgccgccccccagcccgggcgggggcagagccaggaggaaacccggccggcgggcagacccggacacc

SEQ ID NO: 252346 - RNA, 87 nt, Homo sapiens
ggaacgaagaagcaggagcaggagaggcaaacaccagcaacacccgggacaaaaacgggggccaccacccccaccgaaccagcaccc

SEQ ID NO: 252347 - RNA, 75 nt, Homo sapiens
cggagggaccagcgagcgggaggcaagagagaccacggacgcgacacagacacgacacgagccggcagacccgcc

SEQ ID NO: 252348 - RNA, 73 nt, Homo sapiens
cggcccccgcggcggccggcccccccccagggccaggcgccgccagaacggggacaaagccgcgaaaaggaac

SEQ ID NO: 252349 - RNA, 76 nt, Homo sapiens
ccccagcagcagcgacagaccggaaaagcagggaaccagggagaccaggacaaggaacagaaagacccacgggaga

SEQ ID NO: 252350 - RNA, 70 nt, Homo sapiens
agacagagagaaacagagaggagggagaaacagcaaccggcaaggagacccggaccgggggacgggcaag

SEQ ID NO: 252351 - RNA, 75 nt, Homo sapiens
cagccgcggagccgggggcaggagcgagagaagaaaacaaagaaaccaaggccagcggaggaacagcgacgcgcc

SEQ ID NO: 252352 - RNA, 71 nt, Homo sapiens
gcaaggaaaagagcccggaaagaagagacagagaggagcaaacaagagcaagagaaccgcccacaaaagga

SEQ ID NO: 252353 - RNA, 82 nt, Homo sapiens
gggcgccaggcagcaggcccggccacacaaaggagcaagggagacacggagccccggcaccccgggccaggacccggggggc

SEQ ID NO: 252354 - RNA, 77 nt, Homo sapiens
agccacaggagaccggaggccaacggcagaagccaccacaaaagcgaaagggcacaccacagagagcgaccaaaccc

SEQ ID NO: 252355 - RNA, 67 nt, Homo sapiens
cagacccgggcagcaccagaacacaaaagaggaacaacgaccgaggacacaacccccccgcgggaaa

SEQ ID NO: 252356 - RNA, 72 nt, Homo sapiens
gagacaaaagagagagcggaaacgagggaaagaccgacgacccggaggggacccggcagcagcaaagccaaa

SEQ ID NO: 252357 - RNA, 81 nt, Homo sapiens
agcagccagaaccagagcggcccaggcaagaaaagcgcaggccgggccgcaacgacgcagcacgcagcacggggaacgagg

SEQ ID NO: 252358 - RNA, 59 nt, Homo sapiens
ggagcagccgaccgagccaggacaaacagacacgagaaggaagcaacagacgggagaca

SEQ ID NO: 252359 - RNA, 58 nt, Homo sapiens
gcagcccacacagccagcagggggagccaaagcaaacagagcagaccaaccagcagcc

SEQ ID NO: 252360 - RNA, 81 nt, Homo sapiens
caagacgacagcaaaaagcagcagcagacacaaagagaggcccaacggaggaacagcacagcaaacgacaaggcaggaggg

SEQ ID NO: 252361 - RNA, 59 nt, Homo sapiens
cacggggacaccaacaggacccgaagcgaaaggcggcagaggcaccgcagccagacacc

SEQ ID NO: 252362 - RNA, 95 nt, Homo sapiens
cgagaagacaggagcagagacaccagccacggcaaagaccccagcagaagcccccagcagccccggcaggccccgcccccgggggccagcccagc

SEQ ID NO: 252363 - RNA, 85 nt, Homo sapiens
ccacagcaagccccaagcagagaaaccaggagggaaagaagcgccaagaagccaaagacaagacgcaggagaaaacgagacccaa

SEQ ID NO: 252364 - RNA, 74 nt, Homo sapiens
gggggaccgaccgcaacagaacggacccgcggagagcggccgggaggaagcagagggaaccaggacagagcgaa

SEQ ID NO: 252365 - RNA, 72 nt, Homo sapiens
aagagcccggaaggaagaggcagagacagagccaccagccagaagcacaaggaccgaggaaccacgccaggg

SEQ ID NO: 252366 - RNA, 74 nt, Homo sapiens
caaaaaggcgacggcgccgaaacggaacccgcaccaagagcagacacgcagcacgggcagcggcaggccagccg

SEQ ID NO: 252367 - RNA, 82 nt, Homo sapiens
cgcggcgcagcggggcggcagcgaggcggaggcgacgaggaggcggacccccggcgcaggaggccaagaaccgcaaagaaag

SEQ ID NO: 252368 - RNA, 96 nt, Homo sapiens
gagcgcgccaggccgacagccgcggccgggcccgagccacgagagaagaaagaaaaagaaaccgccagcccagagacacgaaagggacagagaggg

SEQ ID NO: 252369 - RNA, 76 nt, Homo sapiens
ccgcggccgcccgagcaggaggacgaacagaaggacaggagaaacaggggccaaaaaaccaaaggagaagaaaacc

SEQ ID NO: 252370 - RNA, 79 nt, Homo sapiens
ccaaagcccaaaccccaggccaagcaaccaccagcagcccccagagcggaacacaggcagcaggagaaacgagaagaaa

SEQ ID NO: 252371 - RNA, 81 nt, Homo sapiens
gcagacccgacaggggaggaccaagcacgccccaaagacgaggaccccggaggaaaagcggaagcggcagcggcgaacgcc

SEQ ID NO: 252372 - RNA, 74 nt, Homo sapiens
cacaaaaaacccagaggccaccgaagcacagccccaaggaaacagagcaaagcagcgacaacaaagacagagga

SEQ ID NO: 252373 - RNA, 70 nt, Homo sapiens
cagcccggcgaagcaagacagcagacagaacgaaaacaaacggaagagagggcagcaagaaagaacaaga

SEQ ID NO: 252374 - RNA, 51 nt, Homo sapiens
cgagcggggcgcgcggccgggaccagcggggacaaggggacggcgaaggcc

SEQ ID NO: 252375 - RNA, 77 nt, Homo sapiens
ggaaagagaaacaaggaaaacgcagagagaacacgggcccaaaaaacaaagggccggcaacggacaagccacccccg

SEQ ID NO: 252376 - RNA, 71 nt, Homo sapiens
caacggacgcagagagaccgaacagaggagggaaaccaagagccgcggggggaggggggacaggcccagga

SEQ ID NO: 252377 - RNA, 76 nt, Homo sapiens
aacccgaagcgaagaagcagcggaggagagacacaaacaggaggaaacgggggaccccagcccaacgccaaacgag

SEQ ID NO: 252378 - RNA, 55 nt, Homo sapiens
caaaacggagaaaaaacgagccagcgccgcccggcacacaaccagaacggagaca

SEQ ID NO: 252379 - RNA, 87 nt, Homo sapiens
cacgcacccccgccaggcccgcgggagcaccgggagccgagggcggaggcgacacccaggcaggcagcggaagagaaagaccgaggc

SEQ ID NO: 252380 - RNA, 43 nt, Homo sapiens
gcaacaagaggaccacccgccgagagagggcagagcgaacccc

SEQ ID NO: 252381 - RNA, 51 nt, Homo sapiens
gggcgacacgaacaacaagcagaggaccaaaggacccagcgaaaggcacac

SEQ ID NO: 252382 - RNA, 62 nt, Homo sapiens
gagacaagaaaaacagccgaaggaagaaacaccggacacagcgacgcacgagccagcgccga

SEQ ID NO: 252383 - RNA, 82 nt, Homo sapiens
gcgggccgacacccggaacggcgggccacggcagcggggagggacgccccgcccgaccggaccggagaaggccacagcaggg

SEQ ID NO: 252384 - RNA, 39 nt, Homo sapiens
gaccgggaggcaacgaggcaccagagccggaggaaacca

SEQ ID NO: 252385 - RNA, 73 nt, Homo sapiens
caccacccggcaggcagcacaccagcccgcagcgccaggggaacaaaccccccacggcccgagcacacagaaa

SEQ ID NO: 252386 - RNA, 76 nt, Homo sapiens
ccggaccaggcagacacaccgacgaaaagaagggcagcaaacaacccccgaaccgagaaagaggaccgacagaacc

SEQ ID NO: 252387 - RNA, 74 nt, Homo sapiens
gcgggaacaggcggagccaccgcgccccggcagcaaagaaccagggggaaggccccgggcagccgagcgccagg

SEQ ID NO: 252388 - RNA, 72 nt, Homo sapiens
cgggaggaccccaagcccccagagccagacgcgaggccggaagggagaaaaagaccaagacagcccagcccg

SEQ ID NO: 252389 - RNA, 55 nt, Homo sapiens
ccccgccggggaccaccgcgcggcgcgagacccgaaaaggggaagaaggccaacc

SEQ ID NO: 252390 - RNA, 69 nt, Homo sapiens
cccgagagaagcagacggaaagaagagagaggaacagcaaaaaggaagggccgcccagcggcacccacg

SEQ ID NO: 252391 - RNA, 70 nt, Homo sapiens
ggaagacggcgagcgggccgggagagcgaagcaaacgaggagcaggcaaaccgacaccagcgacacaagc

SEQ ID NO: 252392 - RNA, 75 nt, Homo sapiens
cgagcggacaacacagcccgccagcaggagccccaacacgagaccaggcgagaacgcggacaagcaaacaaagag

SEQ ID NO: 252393 - RNA, 79 nt, Homo sapiens
ggccgaaagcagaagaaaagggacgcaagaaacccaggacgagaacagcaacaggaaggaagacccacaagagaccacg

SEQ ID NO: 252394 - RNA, 89 nt, Homo sapiens
gcgcccgccccgacccgcccccccgcccgcaacccgccgcccaccaggcccgaggagcgacgaggacgcacaagaccagccacgcaccg

SEQ ID NO: 252395 - RNA, 61 nt, Homo sapiens
gagggcggagcggagacgggagaagaaaagaccagcagcgaacgccgaccaggccacggac

SEQ ID NO: 252396 - RNA, 59 nt, Homo sapiens
cgcgccccccccaggcccgccgcccccgccaaggaggcagcacggcaggagacgaggag

SEQ ID NO: 252397 - RNA, 88 nt, Homo sapiens
gggaaccgcgaccgagacggcaggcggcggaagcgacacagggagggaggccgaagcggcgggaacagcacggccaggcggggcacca

SEQ ID NO: 252398 - RNA, 85 nt, Homo sapiens
aggcaggccaagcggagagaccgccggccgagggggcccaggggcagcgagcaagacagcaagcaggggacccgggagacacacc

SEQ ID NO: 252399 - RNA, 55 nt, Homo sapiens
ggccgcgggccccccgggagcgcccaccccacgggaggccgggacgggacaacga

SEQ ID NO: 252400 - RNA, 72 nt, Homo sapiens
ggcgccggccgagaaggcagaggcggagacggaagccccaaaaaggaaaccaggaaaggaaggcgaaaagag

SEQ ID NO: 252401 - RNA, 86 nt, Homo sapiens
cgcagacggaggcggcggagccgggagcgcaggaaagaccacagcaagaccacgcccccagccgggggaccaggccgaacgacccg

SEQ ID NO: 252402 - RNA, 83 nt, Homo sapiens
cagaggaccggaggccgggaagccaacgaccacacgcacgccgggggaagacagcgcgacagcacacgaccaacgccccccgg

SEQ ID NO: 252403 - RNA, 63 nt, Homo sapiens
gaagaagcccgacaaacgaaggacgcacacaggacaacaagcagaaaaccaaggagcaggccc

SEQ ID NO: 252404 - RNA, 79 nt, Homo sapiens
gacagcgaccgagaggcacgagaaccggcccggcacaggaaggagggccccggagcagccacaccaccgaggccccacc

SEQ ID NO: 252405 - RNA, 80 nt, Homo sapiens
cgccgcgccgggccagccacgcaccccagaaggggaaacgaggcccaaggaaagagaccgcaaagcaccagcgagcgaac

SEQ ID NO: 252406 - RNA, 81 nt, Homo sapiens
ccaggccacccccacaggacgcagcccaccagaacccagcagggacagccagcacagccccaccgcaagggaagagcaaga

SEQ ID NO: 252407 - RNA, 85 nt, Homo sapiens
gccaggaggacgaggagagacagaagaagcggaggccggcaaagccaagacgcagggacagagccacgggaaacaaggaacaaag

SEQ ID NO: 252408 - RNA, 78 nt, Homo sapiens
ggacagaggaaggaacgaaccccacacagagacagagccagccccaggccgcgagccggacaacacaccacaagaacc

SEQ ID NO: 252409 - RNA, 75 nt, Homo sapiens
aggcccccggacggcgcggaccccgacggcgccgggcaaaagcagaccggaaaacccaccggcaagaccacaccc

SEQ ID NO: 252410 - RNA, 72 nt, Homo sapiens
cgaacggggcgcccgccgggaaaccggcaggagggggacaagccaagggccggaggcgaggaggaaggcgcc

SEQ ID NO: 252411 - RNA, 73 nt, Homo sapiens
agcaggaacaggaacaggccgggcagaccaaacggagggcgggcgagcagagaggagcccaggggaagagagg

SEQ ID NO: 252412 - RNA, 68 nt, Homo sapiens
cgagcacaggagggccgaggaacgcagaaagcacgaggccaagggcggggaaggagcgcgagcagaag

SEQ ID NO: 252413 - RNA, 75 nt, Homo sapiens
aaaacaaaaagagcagaggagacaaaccggagaaggagccaagaaagagaagggacaaccgagcagcgcccgggg

SEQ ID NO: 252414 - RNA, 79 nt, Homo sapiens
gaagggcggggggcgggccggaggggagacgggaggcaggagaagcaagggccaggcaggaaggagcaaagaaggcacc

SEQ ID NO: 252415 - RNA, 88 nt, Homo sapiens
gagagggaccggaacggcggcgacaaggggcccgaacagaggggcaccaaaggacagcagaggcgagcagaccggacaggagcgagag

SEQ ID NO: 252416 - RNA, 74 nt, Homo sapiens
gcggccgcggaggagggagaggccaggcaaaggaaggcagcaagaaacagaccgaagagcaagaaacacgagaa

SEQ ID NO: 252417 - RNA, 67 nt, Homo sapiens
cacaccaccggcggcccgggagaggcaaaccaccccggggcgggaacccaggggccggcacagcaca

SEQ ID NO: 252418 - RNA, 41 nt, Homo sapiens
cgccacgggggccagaagcagaggccgcgacagccaccaaa

SEQ ID NO: 252419 - RNA, 71 nt, Homo sapiens
caaaagcgaggcagaaccccacagccacaccagccaaaggagccagaggagcagccaagaagccccccagg

SEQ ID NO: 252420 - RNA, 81 nt, Homo sapiens
cggagcgggcggagacgccgggcagccgaacggagggcgacggagggagcaagaggagccaggagcacggggggaacaaga

SEQ ID NO: 252421 - RNA, 81 nt, Homo sapiens
ggagaaggaccaagaaccagccacagaaagcccgccccagacagggccccggcccgcccggaagcgcagcagcaggcacgg

SEQ ID NO: 252422 - RNA, 69 nt, Homo sapiens
aacacagcggaacaagccaacggacaaccacaggaccaaaacagggcagaagccaggaggacgacgacc

SEQ ID NO: 252423 - RNA, 79 nt, Homo sapiens
ccggccccccagcgcccccggggcaaacccgagccaggagagccaggaaccccaagacggaggacacacacgcacgcac

SEQ ID NO: 252424 - RNA, 69 nt, Homo sapiens
aaagcacccaaaaggaaaagggcgccaacggggagaaggaggcacaagaaggaccccggacacccaacc

SEQ ID NO: 252425 - RNA, 77 nt, Homo sapiens
ccgagccggagaccagcaagacacacgaagaagccacacacagaagacccaaagagaacacaggagaggcaagaggg

SEQ ID NO: 252426 - RNA, 73 nt, Homo sapiens
acccggaccgcgaaggcgggggagacgaaaacggaaagcacaaggcagggaggagaaccccaagagcaccaaa

SEQ ID NO: 252427 - RNA, 57 nt, Homo sapiens
gacaccagaaggcaaggaagaggagaaggcccgagagagaaagggaaagaaggagcg

SEQ ID NO: 252428 - RNA, 72 nt, Homo sapiens
gagaagagccagagcgggaggacgacgagagaggaacacgaaacccgaagaaaggggggccagaaggcaaga

SEQ ID NO: 252429 - RNA, 71 nt, Homo sapiens
gggcccagccacacccgccggaaagcccgagaaacaagcgcgcgggcggagaagaccagaagaacagagca

SEQ ID NO: 252430 - RNA, 79 nt, Homo sapiens
acaccgcaaagcgcacgcccggacggaaggcgcggcacacacaccccagcaggggcgcgccggcccaggccgcccagcc

SEQ ID NO: 252431 - RNA, 76 nt, Homo sapiens
gaagagacgacagagacgaaaaaccgaggcgagacccaaaggggagcgcggccacagacgcacaggcagagacaca

SEQ ID NO: 252432 - RNA, 79 nt, Homo sapiens
aaaggagaagggaaagaaagaaagagacaacgacagccaacagccaggaacgcaagcacaggaccagaaacgaaaggca

SEQ ID NO: 252433 - RNA, 80 nt, Homo sapiens
gggagcaccacggaccccaaggaagccacggcagacacacaacccgacccgacgagagcgaaccgagccgacagagagaa

SEQ ID NO: 252434 - RNA, 78 nt, Homo sapiens
ccaacgaaagacccgaacagagcccaggcaaccgaagcacacagagaaaaaaagggaacaaaacacagcaagcagaca

SEQ ID NO: 252435 - RNA, 72 nt, Homo sapiens
aaccaccaccacagacccagacaggggaaggccagccgccccgggaaagccccgaaaggagaacgggcacag

SEQ ID NO: 252436 - RNA, 65 nt, Homo sapiens
aaccacaaacaacacgaccaaggagggaacaggggaacacaagaggacagcgaagccccgccgag

SEQ ID NO: 252437 - RNA, 69 nt, Homo sapiens
aaagacagacaggaggggaggaggccaggagccgggcccgagggcaggacagcaggcaccggcgaagca

SEQ ID NO: 252438 - RNA, 69 nt, Homo sapiens
gcaaaccccggaaccaggaaaaacaggcggaccagaacggacagcagcagaccagcacgaggaaggacc

SEQ ID NO: 252439 - RNA, 64 nt, Homo sapiens
cgaaacgcacgagaagaaaacgacagaagaaaaagaaaaacacgaggcccagcagacagcgccc

SEQ ID NO: 252440 - RNA, 63 nt, Homo sapiens
gaggagacgcaaggagccaccagcacggaccaggaggcgagcaacagggacaagagaaaaaaa

SEQ ID NO: 252441 - RNA, 52 nt, Homo sapiens
aggagaccacccggacaaggggagaacaaccaggaaaccacgaaccagggag

SEQ ID NO: 252442 - RNA, 74 nt, Homo sapiens
gcccggagcgagggggcgcccgccacgacagaccgacacgacgcagcaccggcaccgacgaagccgcaacccga

SEQ ID NO: 252443 - RNA, 80 nt, Homo sapiens
ggacgcggggggcgggaagagccggggccgggcgacaggagcagaagaagggagcgggggagcgccgcacgaaaccccaa

SEQ ID NO: 252444 - RNA, 63 nt, Homo sapiens
aggagacccgaccccagaaggaaagaaacgcggcaagaaagcgacccgagggccaggaacaga

SEQ ID NO: 252445 - RNA, 68 nt, Homo sapiens
acacgagcaaacgccacccggacaccagcccacaggaaacaccgaaaaacagcacgccggccaagaga

SEQ ID NO: 252446 - RNA, 71 nt, Homo sapiens
aggaccaagaaccaggggcaacgagggagaccaaagggaagggaggccaggaccaaagcccaggggcaaga

SEQ ID NO: 252447 - RNA, 99 nt, Homo sapiens
caagcaacgcaaaaacaccaagaaccaaccacaggcagagggaaacgggaggggaccgagccagaggggaaagagggaaaacccaccgggagcacgaag

SEQ ID NO: 252448 - RNA, 80 nt, Homo sapiens
aggcccgagcagggaccgccgcgcacgggcaaggcgacagccacacgaccaccaccacggggcccggagcacacaagagc

SEQ ID NO: 252449 - RNA, 80 nt, Homo sapiens
agcgcgaggacgccgagagcgagaaacaaagccacccagccaagaaggaggagaaagcaaggacccagagccacacgaac

SEQ ID NO: 252450 - RNA, 35 nt, Homo sapiens
ccccggaacggcaccacaagggcaggaacggagcc

SEQ ID NO: 252451 - RNA, 80 nt, Homo sapiens
cgaaggaccggcgcgggaccaagacaaccccggcacgaggccaccccagcagacaggccaaggcccgggcaagccaacac

SEQ ID NO: 252452 - RNA, 77 nt, Homo sapiens
gaagaaaacaagggagcacaagggccgaacacagacagccaaccaggcgcggacacggccaacacgggaaggaaaag

SEQ ID NO: 252453 - RNA, 68 nt, Homo sapiens
ggaccaaaaacacgagagggaccagacaggggagagcacaggggaagggaaaccccagagaagaaggg

SEQ ID NO: 252454 - RNA, 92 nt, Homo sapiens
aaacacggaacacgagggaaacagcccggaccggcagacccagcaaaagcgccacagcaaaagcagacaggcaaaaacacacagaggaagcg

SEQ ID NO: 252455 - RNA, 73 nt, Homo sapiens
ggccggaggagccagagcgcagaaaggcagaacagagaagaagaaacaaaagacgagccccagaaaagggcgc

SEQ ID NO: 252456 - RNA, 81 nt, Homo sapiens
cgcagcccgcagacagaggggcgacgaccgcacaacagaagcccaggccccccgagcgcacgcacgcggagccagcagacc

SEQ ID NO: 252457 - RNA, 75 nt, Homo sapiens
ccaaggccgcgcacaaagacaccaaacgcggcaacagagcccagaggggggaaacaggccgagcagcacgccgac

SEQ ID NO: 252458 - RNA, 106 nt, Homo sapiens
gcaggcacacccaccgggaaagacccaggacccagaacacaacacgagagccacaacacagcagcccccaggagagcaggaaaagccggagaagccaacaggcgga

SEQ ID NO: 252459 - RNA, 77 nt, Homo sapiens
cgacagaaccgaaaaggaccccaaaaaggaacgggaaccagggaacaagcagcagccgagagccgaaagggccagga

SEQ ID NO: 252460 - RNA, 78 nt, Homo sapiens
agaccgaacccagaaacagagggaggaagacagccagcagcaagagaacacaacggcaagaaaaacccaacaaggcca

SEQ ID NO: 252461 - RNA, 74 nt, Homo sapiens
gcacccacccacggcaggagaccaggggacagggggcgaggaaaacaaaacaacaagccaacaccagaaaacgg

SEQ ID NO: 252462 - RNA, 74 nt, Homo sapiens
acagggcaaccagcggaaccaagcagggagcagcaacagaaccaacgaacccacggacgggccaacgcacggcc

SEQ ID NO: 252463 - RNA, 80 nt, Homo sapiens
ggagagccgagcccaaggcaagacccaaggcgacgaccgacaggggggaaaggagcacacacaagcgagaagaggacagc

SEQ ID NO: 252464 - RNA, 107 nt, Homo sapiens
ccgaacccgccgcgaggggcgagaaaggcccacgcagcccccaagcagagccggcagcgcccgagggagcaaggagaagagcggaacccagaccgcgcccggagcca

SEQ ID NO: 252465 - RNA, 69 nt, Homo sapiens
acccccgcggccggcacccccgaaggccagcggacgcgcaccggcaaaccaggcgccccgaggagaagc

SEQ ID NO: 252466 - RNA, 66 nt, Homo sapiens
gcagacaaaagggccaaagaagggagagagaagcggaacgcagagccagaagagacgaaggaccca

SEQ ID NO: 252467 - RNA, 77 nt, Homo sapiens
aaacgcgaggggaacgcagccgccagggagaaaagacgaggaagcccaaaaaccgcaagaaaggcacagaagaagcc

SEQ ID NO: 252468 - RNA, 69 nt, Homo sapiens
acgagaagaagggcaacccaggagcaaaagaacccgaagaaagaaggaaccccggagcagcccacccgc

SEQ ID NO: 252469 - RNA, 61 nt, Homo sapiens
ggccaggcggccccgagcggaacggagaaagcgagggggacggagggaggcccggggcacc

SEQ ID NO: 252470 - RNA, 78 nt, Homo sapiens
gggaagacaccagcggccggaaggaccaccagccccaaggaggacacagccccccagggcagggacgaggccggaagg

SEQ ID NO: 252471 - RNA, 52 nt, Homo sapiens
cagccggggaaaacccaagaaacacagcggagaccagaaaccccaaaagaag

SEQ ID NO: 252472 - RNA, 77 nt, Homo sapiens
agaaaacaggacggcagagcacgaagcagcgaaaccaggcccaaaagaccaccagggagaccccggaagaagacgac

SEQ ID NO: 252473 - RNA, 83 nt, Homo sapiens
cagggcaccgcgcgaagcggccaaagccgcccagacggccaccggcgggaggaacaaaagccgcccccccaccgcggaagagc

SEQ ID NO: 252474 - RNA, 52 nt, Homo sapiens
agcgggaccgggagcaggcaggcagggagcagccacacaagcgggccgcccg

SEQ ID NO: 252475 - RNA, 76 nt, Homo sapiens
ggagacaccccgcagcacagccgcgaccaaggaacaaaccagccccaggaaagaagggaggaggggacgaacgccc

SEQ ID NO: 252476 - RNA, 67 nt, Homo sapiens
gccgcgggagagaggacccccccccccccccaagacagcagcgcccaaggacaagccaagcggccca

SEQ ID NO: 252477 - RNA, 83 nt, Homo sapiens
acacccccagcacaccgaggaggcaggaccgcacgagcccgggcgcgccaggcacagccaagagcggaccggcagcggccagc

SEQ ID NO: 252478 - RNA, 75 nt, Homo sapiens
caacacgcaaacgagagcgaggcaagaaaaacagaggccaaaccgccgccgggggaggggcccgcagcgaaacaa

SEQ ID NO: 252479 - RNA, 70 nt, Homo sapiens
gggccaggaccaggggccaccacagagcccgcagggacacagcagaacaagcaacccccggcacgaaaag

SEQ ID NO: 252480 - RNA, 57 nt, Homo sapiens
ggagcgccacgcgcggaaggcagcgcccagcagcgcagcccgggaacacagagcacc

SEQ ID NO: 252481 - RNA, 70 nt, Homo sapiens
ggccccagggcaccccgcgggccgcacgccccaccccgagccggggaagaccacagagcagacccgcaca

SEQ ID NO: 252482 - RNA, 83 nt, Homo sapiens
caaagcaacccaaggccaaaagggacgcggcacagaacgaagaagaaagcagaagcaagagaaaaaagaaacaccgagacggc

SEQ ID NO: 252483 - RNA, 80 nt, Homo sapiens
caagaaaagacaagaaacaggaaaagaaaccgaaagaacgcgggagaaaagaagagaccaaaacaagcagaacggaccaa

SEQ ID NO: 252484 - RNA, 72 nt, Homo sapiens
ccagcccagagcccaaagcgccaggaagaccaaaccggcagaaggcggcagcggagcacgcaccaggagccc

SEQ ID NO: 252485 - RNA, 70 nt, Homo sapiens
gcccccaggccagaagcggccagagccccggacaaagaggaacacgacagccagcccggacggacggccc

SEQ ID NO: 252486 - RNA, 93 nt, Homo sapiens
cgggacggaccgagaccggaccgagagcggaccgagagcgcgaaacgcacgagaaggggcaaagagaaccaggagaccccaccaccacagaaa

SEQ ID NO: 252487 - RNA, 81 nt, Homo sapiens
ccaagggaggcccgggaaacggaaggcagaagccacgcagaccagccggccacgcaccggaaaagaagagaggaccggaaa

SEQ ID NO: 252488 - RNA, 82 nt, Homo sapiens
ccacggagggaaagaccaggcagggagcagaaacgggagaaaggaaagaagaaggcaacaagcaaggaagacgaccagagag

SEQ ID NO: 252489 - RNA, 75 nt, Homo sapiens
cgcgccgcgaccgcccgccggacgaaaagaccccgcacacccccgagcagaggcagaggggcccgcacgacaccc

SEQ ID NO: 252490 - RNA, 79 nt, Homo sapiens
agaggaaacaacccggcgaggagagcaaggcgacagacacagcaccggccccggcagcgggacgcaggacggcagccgg

SEQ ID NO: 252491 - RNA, 85 nt, Homo sapiens
gagggccgacccccccgccggggagggcccagcgcaccgacaggagaacgaaccgggcagcaaagacaccacagagcccgaacaa

SEQ ID NO: 252492 - RNA, 75 nt, Homo sapiens
accggaacaacaagcgaacggagccagagcaaacaggcgaaaggcacacagggaccaagaagccccggggacacg

SEQ ID NO: 252493 - RNA, 68 nt, Homo sapiens
gcaggcccgacaagccgaccagccaagaccggagagaacagaaaaaaagcggcccgggaccaggaaag

SEQ ID NO: 252494 - RNA, 77 nt, Homo sapiens
cgcggacggccggagacggagccgcagagggcccacggggaagcgagagaggagggggggccacgaagaaaagaagc

SEQ ID NO: 252495 - RNA, 68 nt, Homo sapiens
gggcaccgcagcgaccacccacacaaacccgggacgggccgagaggaggcagaaggcaaagcaagccc

SEQ ID NO: 252496 - RNA, 67 nt, Homo sapiens
gccaacaccggcgcggggcaggcaagcgcgggacaaccaacacaaccaaagagaagaaaacgcaaag

SEQ ID NO: 252497 - RNA, 90 nt, Homo sapiens
caaggaggaggagagagaccgcgagccgacaccagcgaccaaggcgagggcgaggaagcagccaaaaccaaacccgcgcccgggcaaggc

SEQ ID NO: 252498 - RNA, 61 nt, Homo sapiens
ggaccccggacgcgggaaaggcacagcagcggccaagggaggaacccgacacgggcacgga

SEQ ID NO: 252499 - RNA, 78 nt, Homo sapiens
cccgccagcagccgccggagccagccaacgagcgagccgaagacacaaagcgcaagaggcagcagaccggaagaaaaa

SEQ ID NO: 252500 - RNA, 93 nt, Homo sapiens
gggagcaggcgaagaccgggccccgccaggccgccgacgcaaagcaaggagagcgcgagagaacaggggccgaacgagggaagacggggggcg

SEQ ID NO: 252501 - RNA, 71 nt, Homo sapiens
acacgcccgaccaacaagaggaagaacagccaagaacaggaaaacgcaacacaagggaaagagcacgacgc

SEQ ID NO: 252502 - RNA, 74 nt, Homo sapiens
cgcgccgacggcccaccacaagacagaagcgaaggggacagggggagaaccgccagggaaacccgggggacaga

SEQ ID NO: 252503 - RNA, 84 nt, Homo sapiens
agcaaggcggggaagagcgggcgaccaaggaggaagacagcgaacccccccaccacaggagcccagacccgggcacggcacacc

SEQ ID NO: 252504 - RNA, 53 nt, Homo sapiens
aacccaaggacaacgacgggccccacgcagaaccggccgaaaagcacaaacag

SEQ ID NO: 252505 - RNA, 74 nt, Homo sapiens
gagcgagggggggcgcgccggaaaccggagcgcgcagcaggcaccgacgagagggcgcaccgcgccggagcccg

SEQ ID NO: 252506 - RNA, 81 nt, Homo sapiens
ccgggagcacgcacgccacgaagcccccagaaacccacaaagccccgaggggcagggagcccagagggaacccccccacca

SEQ ID NO: 252507 - RNA, 81 nt, Homo sapiens
gggagcggggccccacacccccccgggggggacgacgcagccagagcagcaagaggccaaggggacgacggccacgggccc

SEQ ID NO: 252508 - RNA, 62 nt, Homo sapiens
aacgaggacgcggacgcgaaggcagggaacaggcaggaaaacgacccaaaacagccaccaac

SEQ ID NO: 252509 - RNA, 62 nt, Homo sapiens
ggacccaaaccagaagaaaaccgaaccgaggacagggaacaaaggcagagaaacgcacccca

SEQ ID NO: 252510 - RNA, 58 nt, Homo sapiens
gcgagcgcggcgccggggcggggcccaggagacggaggagacagacccagcacggacc

SEQ ID NO: 252511 - RNA, 70 nt, Homo sapiens
gacccaacacccggaaaaacccaggaaagagcaggagacaaacgcgggcacccccaggaaagaacaagcc

SEQ ID NO: 252512 - RNA, 84 nt, Homo sapiens
ccacgagaaggcggaccgaggacgaaggggacgaggagcacaaccagacagggccaccgcaggggagagcaccgcccaccacgc

SEQ ID NO: 252513 - RNA, 108 nt, Homo sapiens
ggcgacacgacggcggaacggggaacgacggcccagcaggcggggaagagaaaggagagaaaaggaacagccgaagccaggggcaagcgaaaccacagaagaaaggag

SEQ ID NO: 252514 - RNA, 77 nt, Homo sapiens
aggaccaagaaccagaccgagacaggggcccggcaccgcgcccgagcccacccacagacagaaggggaggagacgcg

SEQ ID NO: 252515 - RNA, 38 nt, Homo sapiens
aaccagaaacaggcacagagcgcagggagaagaaacga

SEQ ID NO: 252516 - RNA, 72 nt, Homo sapiens
agcgcgaggggacgagagccaggaagaaagaagcgaaggacgacagcagccagaaggaagggacgcaaaaag

SEQ ID NO: 252517 - RNA, 68 nt, Homo sapiens
gcagaaaaaaagcgggcagaccacgaaacggccccaccgcgacgagcagcgacaaccacggagaacaa

SEQ ID NO: 252518 - RNA, 72 nt, Homo sapiens
ggagccgaccgaggcgcccgcggggcggggaccgccgcccgggcgggaccagcaccgccgaagggaacagcc

SEQ ID NO: 252519 - RNA, 73 nt, Homo sapiens
aaagaagacagagccaaagccaggagggggccacaccgaacccagccgggaggccaaggccagggagcgagcc

SEQ ID NO: 252520 - RNA, 79 nt, Homo sapiens
acccgcgacccgaaccggaaggaggggcaacaaacaaccacccgcccagcagacgccagaagcaaaagagagacagaaa

SEQ ID NO: 252521 - RNA, 80 nt, Homo sapiens
agggagccccggaggggggcggcgcccacgggggagcgagccggagacagcccaggaccacaagccagaaaacacgcgga

SEQ ID NO: 252522 - RNA, 76 nt, Homo sapiens
cccaccgagaaccagccaccgacccagccacccgccaggggccagaccagccagcagcccagccccaaaagagaag

SEQ ID NO: 252523 - RNA, 95 nt, Homo sapiens
gcaacacccgagaacggcgggaagagaagacacgagcacaaacggccccgagccccggccccaaagacccaaaacagagacaccccccagccccc

SEQ ID NO: 252524 - RNA, 78 nt, Homo sapiens
gcccagcgcacgagagagggacaagcagcagcgcaggcaagggcccaaacagaccaggccagcggaagccgccacccc

SEQ ID NO: 252525 - RNA, 70 nt, Homo sapiens
ccggacaggcgccgaacacaggagggcaagccccggcccgaggcccaccccaggccccgagaggacacca

SEQ ID NO: 252526 - RNA, 55 nt, Homo sapiens
aagcgacgaggagcaaccagaaacacagggacaaacaaaacagagcgcacgaaga

SEQ ID NO: 252527 - RNA, 73 nt, Homo sapiens
aaagagcaggccgcggcccggcaccaagggacccgagagagcgaaagagcgaaaagcaaaccggagcgcgaac

SEQ ID NO: 252528 - RNA, 80 nt, Homo sapiens
cagcgcggggcgggcaccaaggccgaagcacccgggaaggaagacccacaagagaccacgcagagacagcacccaaccgg

SEQ ID NO: 252529 - RNA, 65 nt, Homo sapiens
gacgagaggccggacaccgccccgagaccacccaagggggggcagagggaggaggcggagagaca

SEQ ID NO: 252530 - RNA, 80 nt, Homo sapiens
ggccagagcacccgcacccggagggaaacgggcaagaggccccagcccggaaaaggagaaagaaaggcgcaaccaaacca

SEQ ID NO: 252531 - RNA, 77 nt, Homo sapiens
accaagagaacggcccaaagaaacccagacagacccaagccaagcgcccagccaccgcaccacagccaggaaccaag

SEQ ID NO: 252532 - RNA, 74 nt, Homo sapiens
caaggcaagaccgaacagaaggaacgacgcggaccagaagccagagcgaggacgccggcagacagagcgcggca

SEQ ID NO: 252533 - RNA, 77 nt, Homo sapiens
gccgcccgcccaaggcaggaagaggggccgcaaagaagacggagaacgggaaagcgcacaagccaccgcggcccggg

SEQ ID NO: 252534 - RNA, 87 nt, Homo sapiens
gcgagccccgggcccgcccggggccggcgaggccaccgaggcgaggagaggagagccagacacgcagaccccaccaagaggcggagc

SEQ ID NO: 252535 - RNA, 77 nt, Homo sapiens
gaagagaagcagaaaaccagaagcacaaggacagagcacccaccacaggaggccaagacgcccccaagaaagcgcca

SEQ ID NO: 252536 - RNA, 81 nt, Homo sapiens
caaagagaagaaacacaaaacccggagaaaagcaccagaagcggcgagacagaagaaacacaaccagggcaagcagagacc

SEQ ID NO: 252537 - RNA, 86 nt, Homo sapiens
agacggagcggagcgaccgagagagaggcccagcgggagaagaagcccaaaacgaagacaccacaaggagcgcagaggggccggga

SEQ ID NO: 252538 - RNA, 78 nt, Homo sapiens
aaccagaagagcgcaacaaggcagcccggcggcccgcgagcccgggagacgccagagagccccggacaggacccgacg

SEQ ID NO: 252539 - RNA, 71 nt, Homo sapiens
aacggggagcaagagccaaggacggaaaacggcaccgcgagcgcagacgagaggaccgccgaagagcacca

SEQ ID NO: 252540 - RNA, 85 nt, Homo sapiens
agaaggcgaaggaccccaacggggaggccaacggaagaaaggcgaggggacggcggggagcgcaggacagacgcccccgcgagac

SEQ ID NO: 252541 - RNA, 78 nt, Homo sapiens
gaagcccaaaggaccacccacccaggcgccaggaacacaggcaagaggcggggaaaaaggagaagccagaacaaagag

SEQ ID NO: 252542 - RNA, 82 nt, Homo sapiens
accaccggacaaccgacaaaagccaagacaaggccgagaccgcgggaagaagaaggaggagcgcgaaacagcggacgaccga

SEQ ID NO: 252543 - RNA, 71 nt, Homo sapiens
ccgacgaggccccagcgcacggaccgccggccgggcggccccgccacccacagggaaaacacacgaccaga

SEQ ID NO: 252544 - RNA, 78 nt, Homo sapiens
ccagaacccggccccaccgccccaccaccccaccagacggcgccccaagaccagcggccgcgcgccgggccccgaaga

SEQ ID NO: 252545 - RNA, 82 nt, Homo sapiens
ccgccgccgcgaaggacagccccgcgcgggacccggggcgccacgggggccagaagcagacagggccagcacagcaagggga

SEQ ID NO: 252546 - RNA, 73 nt, Homo sapiens
ggaaaggaaccaggagagagcagccagagggacgcaggcgggcacggaaacaaggacccgagcccacgaaggc

SEQ ID NO: 252547 - RNA, 79 nt, Homo sapiens
caccaaagcccagacgggaaccagaccggaccaccacacccggacggcagaagcccaggagggcggccgcgcagcccca

SEQ ID NO: 252548 - RNA, 82 nt, Homo sapiens
gaagggccggcccgcccccggccggggcgcagcggaggcagggaagaagcccagcggaggcgaacggcccccgccaacacga

SEQ ID NO: 252549 - RNA, 68 nt, Homo sapiens
accacgcaccagcgccacaccacaaagaaagcgcgggagcgaccccggcaggaaggcgacccaggaga

SEQ ID NO: 252550 - RNA, 74 nt, Homo sapiens
gccaggagaacgaaacaagcaggacaagaagcagcaggaaaaacccgaaagaacacccaggaagccgaaaagaa

SEQ ID NO: 252551 - RNA, 91 nt, Homo sapiens
gcaagccaagcagccaaaccagaagaaaagcacaggaaagaagcaaggaagaggagccgaccccccagggaggccgcagggacgaggacag

SEQ ID NO: 252552 - RNA, 78 nt, Homo sapiens
gggaaggaggccgagccgggaccaggcccgggggcggcggccacgccaaggacgggcgaacaagaggcgccagcgggc

SEQ ID NO: 252553 - RNA, 83 nt, Homo sapiens
acagagcagaggaccagcagagaaggacaccgaagcagaggagcagcaggaccagcaccaggagaaagggaacggaacaggaa

SEQ ID NO: 252554 - RNA, 70 nt, Homo sapiens
gaagaaacagaagaaaagcccagggcggcaaagggccacaggacagcaccgcgcaaaaagagaaggccca

SEQ ID NO: 252555 - RNA, 80 nt, Homo sapiens
gcaacaggaaagcagcccgaaaaagacgcgagaagccacacgggggggaaaccagaaccgccggagaacagaggcaacca

SEQ ID NO: 252556 - RNA, 78 nt, Homo sapiens
ccagagggcacaggaagaccccagaaagacaaaaccgggcaaccgaacgacccaggcagcacagcggggccgggacag

SEQ ID NO: 252557 - RNA, 69 nt, Homo sapiens
cacacaccgcacaacgcaaccagccggcacgggcagaacaagccccccgggagagaagaggaaggacag

SEQ ID NO: 252558 - RNA, 68 nt, Homo sapiens
cacccacgaacgcccaccccccgaacccagccgcaccggaagagacccagacgaagagcgcacagaaa

SEQ ID NO: 252559 - RNA, 81 nt, Homo sapiens
gggaccgggcgggcgggccccccggcaacgcggcaagccaaagcgccacagaggagcaccggcccaggcggaggcaaggcg

SEQ ID NO: 252560 - RNA, 81 nt, Homo sapiens
gaaacaggacccgagcgaagccaagccgggcggcaggggaacccaccgagggcgaaagaccggaaaaggagagccaagaac

SEQ ID NO: 252561 - RNA, 86 nt, Homo sapiens
ccgcggcgaagagcaccgcagaggccggcaaggggccagaccacagaggcgaggggacggcggggagcgcaggacagacgcccccg

SEQ ID NO: 252562 - RNA, 78 nt, Homo sapiens
accaagaaagaaagagggaacgagcagaccacacgaggcaagcaagaaaagccacgaagaaccacccacgaacacaga

SEQ ID NO: 252563 - RNA, 72 nt, Homo sapiens
caaagagccaagcaagggggaggcagcgcacgggaagcaggaaaacgaggccgcgggccggggcggggcaaa

SEQ ID NO: 252564 - RNA, 72 nt, Homo sapiens
accaaggggcaaggaggcagaggggcgggcaaaggagaggcacaggaagcagaggcaagaaacgaaggcagc

SEQ ID NO: 252565 - RNA, 90 nt, Homo sapiens
accagaaggggagaaggcaggcaccacaaaaaggacaggcgcacaaaagaaaagcaaaggcacgaacaaagcggccagagggaaaaccaa

SEQ ID NO: 252566 - RNA, 62 nt, Homo sapiens
gggcaggaggagaaggcaaagagccagcccggcgcgggacaaccaacacaaccaaagagaag

SEQ ID NO: 252567 - RNA, 74 nt, Homo sapiens
caccccgaaagccaaggcagaacagcaaaaccggacaaaacagaggccaacccaggaggaagaccaggcagccc

SEQ ID NO: 252568 - RNA, 73 nt, Homo sapiens
gacggccgcggacaacagaaccgggagcgacgaggaaaggaccaacgggccaggaagaaacccaggcgcaaag

SEQ ID NO: 252569 - RNA, 52 nt, Homo sapiens
cagaaacagaaggaggccggccgacacaaacagaggaaacgggacagaggaa

SEQ ID NO: 252570 - RNA, 83 nt, Homo sapiens
ccagagcgccccggacgaccaggcaccgcgcgggcagggcggagggggcagggcagaaggaccaggggcgacgaggcccagag

SEQ ID NO: 252571 - RNA, 71 nt, Homo sapiens
gaaagcagaggaagccagcgcaaacgcaacccagagaaggcacgggaccagagcagcgcacgcggacgccg

SEQ ID NO: 252572 - RNA, 72 nt, Homo sapiens
gaggagcacagaacgccaggaccaaaacagggagaaacacagccagaagacacgggcggggaggacccgggg

SEQ ID NO: 252573 - RNA, 74 nt, Homo sapiens
acgggccaggagagcagggccggaggcagccaagaggaacagcaggaaagaccagggggagaggcaccagcaac

SEQ ID NO: 252574 - RNA, 95 nt, Homo sapiens
accgagaccggaccgagagcggaccgagagcgcgaaacgcacgagaagcggaagccgcagaaggaccggccagaagcaagccggagaacagaaag

SEQ ID NO: 252575 - RNA, 56 nt, Homo sapiens
cacggcaggaggaaaggacgaccagcggacacgaacagcccaggaacacagaccac

SEQ ID NO: 252576 - RNA, 72 nt, Homo sapiens
gaaaccaagacagcccaaacgccccacgaccagccagaacggagagcgaccccaccccgcggccggcgcggg

SEQ ID NO: 252577 - RNA, 86 nt, Homo sapiens
gaggagcaggcgcggccgcggcgccaagcggccccagcggccgcgaccgagcaggcgagaccacgggacaggggaacggacgagac

SEQ ID NO: 252578 - RNA, 37 nt, Homo sapiens
gcagagaaaaggaacgcacagcaaggacaaggaaggc

SEQ ID NO: 252579 - RNA, 80 nt, Homo sapiens
gacacaagcccaccaagcaaagaggcgcccagaaagcagaacaggccaccgggccaacgaaaagccaccggcccaggcgg

SEQ ID NO: 252580 - RNA, 78 nt, Homo sapiens
gagcaaggcccggaagcgaggaccccaggaagccggaaggccaggcgggccacgaaaacgccacagagccagaccagc

SEQ ID NO: 252581 - RNA, 84 nt, Homo sapiens
aagacccccacaacaaagcagcaacaagaaagcagaggaagcagaaaggaaggaggggccaaaagcaagacccccgcgggagga

SEQ ID NO: 252582 - RNA, 63 nt, Homo sapiens
ccccacccggagcgcaccacaaccgcagaaaaccgcgcgggagggggcaagccaccaggaggg

SEQ ID NO: 252583 - RNA, 74 nt, Homo sapiens
gggacaagacgcaaaccggcaaccacgcccagcgcaagaaagcgaagagccacgaaaagcccaggggaaaaagg

SEQ ID NO: 252584 - RNA, 75 nt, Homo sapiens
cagggcccaaaaaaagggcaggaaccacgaaggacagaagacaccacagagagacgaggacgcgcacaggaaagg

SEQ ID NO: 252585 - RNA, 75 nt, Homo sapiens
accaccagggagccaggagagaagcggggggagagagcgagccccggcagccgccgaccaccgggggagagaaag

SEQ ID NO: 252586 - RNA, 61 nt, Homo sapiens
ggcggcggccagcccgacacaggacccaaagacaggaccacgcaccagcagagaaggaaag

SEQ ID NO: 252587 - RNA, 76 nt, Homo sapiens
gaacacaagacacaaacaaaccacagggagggaccaaccagaaggccagacacgagcgaccgccccgccaagacag

SEQ ID NO: 252588 - RNA, 64 nt, Homo sapiens
gagcgaggagcccggcgagaagaggagaggggaaggacgaacacaaaggggcagcaacaccaga

SEQ ID NO: 252589 - RNA, 73 nt, Homo sapiens
gaagcaccggccagggcaccggggcccggcgcccgggcccgccccggagggagacagacccagcacggacccc

SEQ ID NO: 252590 - RNA, 81 nt, Homo sapiens
aaagggagcgaggaccaggaagcacaaagggaccccagccgacgaaccacggaggaaggaggagggcgaccgcgagaccca

SEQ ID NO: 252591 - RNA, 80 nt, Homo sapiens
cgggcaggcagccgcgcaggacggggcgggaccagacaggcgcgcacagaaggcggcgagcagaacagagcggccggacc

SEQ ID NO: 252592 - RNA, 82 nt, Homo sapiens
ccccccagccggcaccgggcgccgcaaggaggcacaaaaagaacaaccagaaggaacgcagagaccgacggagagcagccac

SEQ ID NO: 252593 - RNA, 78 nt, Homo sapiens
gcagaagcagagacaccaggacagaaaagacaggcgccaggagcacagaagagcgaggagggaagaaggccgaagaag

SEQ ID NO: 252594 - RNA, 55 nt, Homo sapiens
gaaagcccaggacgggccaagagagcccgggcccggaaagcccgacccgacacca

SEQ ID NO: 252595 - RNA, 73 nt, Homo sapiens
gccccaaacccggacgaaacgaccccaccagccccaaaaggcggcaacaggagccaaggcgagcgcaacagca

SEQ ID NO: 252596 - RNA, 84 nt, Homo sapiens
gaccggcagaccgccgggggacggaggcccagaaacgacaggacacagaacagagaagaagcagacgagacagaaaaagaacca

SEQ ID NO: 252597 - RNA, 70 nt, Homo sapiens
aacggaccagaccgaccaccaaaaggagagaacagcacacagaggcgcaaggggaagagaaaagacagaa

SEQ ID NO: 252598 - RNA, 59 nt, Homo sapiens
cccccgagggcgggaacagggcccgagggggccggcgccaggaagaccagccccaccgg

SEQ ID NO: 252599 - RNA, 79 nt, Homo sapiens
cgcgccgccaccgcgaacaggagcccgacagaagggggccaaagggcgagggcacaaaaaaccacaccccccaccgagg

SEQ ID NO: 252600 - RNA, 80 nt, Homo sapiens
aggagaaggcgagaacgagagaggcagacaaacccacagccagagggagcccaaggacgcgaccgaaaacggagccccca

SEQ ID NO: 252601 - RNA, 78 nt, Homo sapiens
acaccagaagacacacaggaaggccaagagaggccaacagaggaacaaggcccgcagaacccaagagcaaaagcagcc

SEQ ID NO: 252602 - RNA, 58 nt, Homo sapiens
gagacggcgcggcacaaggggcgagaccagaggacgcgggcccagcgcagcccccagc

SEQ ID NO: 252603 - RNA, 80 nt, Homo sapiens
cccaacgaccggggcgcggcagccacccgcccacaacacaagaagcccagggaggaccccagcccagggcagggccccaa

SEQ ID NO: 252604 - RNA, 71 nt, Homo sapiens
cgggcagccgaggacaccacaagaacaaagaggcaggccccaaggaccagcaccggacgggaccaccagcc

SEQ ID NO: 252605 - RNA, 79 nt, Homo sapiens
cgccaagggacggaccacgcccgcaccagaagccgacacacagagacacagccaggccagggcccgggcagcccgcagc

SEQ ID NO: 252606 - RNA, 78 nt, Homo sapiens
cggagcgcgggcgccggggagccaggccaggcgcgggccaccccacggggcaacaagggccaccagcagggacggcgc

SEQ ID NO: 252607 - RNA, 38 nt, Homo sapiens
ccgggacacggcaggccaggcgccaccagcaaaaccag

SEQ ID NO: 252608 - RNA, 60 nt, Homo sapiens
ggcaccccggcccaggacacagggacgggacgccacagagccaaggccaccgagccacaa

SEQ ID NO: 252609 - RNA, 80 nt, Homo sapiens
caaccggaacagcccccagcggcccaggcccaccgagagcggcccaggaggaacaaccagcccacccggagagggcacgc

SEQ ID NO: 252610 - RNA, 42 nt, Homo sapiens
ggcggacgacgagcaagcagggggacagcaagcagcaaacca

SEQ ID NO: 252611 - RNA, 64 nt, Homo sapiens
gcaccgcagcgccggggcacgacacaaaaacagcagcaagcagagcccggacaggcccgccacc

SEQ ID NO: 252612 - RNA, 84 nt, Homo sapiens
cgaggggcgacgaggagagaggggcacccagagaaggagagcagcccggccaaggagcagacaggccgcaccaacaagaagggc

SEQ ID NO: 252613 - RNA, 72 nt, Homo sapiens
cggcccggccgaccccaccgggcggcccaccgggagcgccaagccagcaggaaacaggcaaacacagacgca

SEQ ID NO: 252614 - RNA, 68 nt, Homo sapiens
aagggacagaacccccggaagacaccaggccacacagccgaaaacacggagagggaggcccacagcca

SEQ ID NO: 252615 - RNA, 63 nt, Homo sapiens
gccggaggagccgcaggggcccggacaaggagggagagaacagcacacagaggcgcaagggga

SEQ ID NO: 252616 - RNA, 78 nt, Homo sapiens
ggcccggaggcccagaaacgggccgcgccaccaagagcaccacccaagccgagaaaagggccccggaggccccaggac

SEQ ID NO: 252617 - RNA, 78 nt, Homo sapiens
gaacggaaagagagccagaaaacagaagaacaaacagagacgcgaaacgaccccaacaaaaaagccaaccaggaaacc

SEQ ID NO: 252618 - RNA, 77 nt, Homo sapiens
ggcgccagccggaagcccgagggcagcgcccacggccgcgaccggccggcacgaacgagacacgccgggcgcgaccc

SEQ ID NO: 252619 - RNA, 65 nt, Homo sapiens
gccaaagaagggagagaggcgcaagacgggaacacgagacccccccagaagacggcaggcggaag

SEQ ID NO: 252620 - RNA, 52 nt, Homo sapiens
aacgggcccacacaacccaggcaaccaacaggacacagaaagcgccccaagc

SEQ ID NO: 252621 - RNA, 81 nt, Homo sapiens
gagcaggaggacggaaccagggccaggcgaggaccaacccaccccaccagggggaggaagcgggcccgcacacaccaaaac

SEQ ID NO: 252622 - RNA, 62 nt, Homo sapiens
gagaggagcaagcagcggccggaggacgccaaagaaggcacagcagcaggcgcaaaaacgaa

SEQ ID NO: 252623 - RNA, 80 nt, Homo sapiens
aagaaggagagcgacagcccaagcaccaggaacacaaaaccaaaacggacaggggccacagagacgacgagagaaggagg

SEQ ID NO: 252624 - RNA, 76 nt, Homo sapiens
aaagcgagcaaggaggcgggacagagcgggagccaccagcgccaaagggaagccaggagcccgggggcacggggag

SEQ ID NO: 252625 - RNA, 34 nt, Homo sapiens
gacccacaacgaaaagggcacacagggaccaaga

SEQ ID NO: 252626 - RNA, 74 nt, Homo sapiens
agcacgaaacaggagaaaaagaaggcgagaggaaccagcaaaaaagagaggccccaaccacggagccaggggaa

SEQ ID NO: 252627 - RNA, 54 nt, Homo sapiens
gcggacccaaggaaaccacgggcaagaagggagaagcgggaacggaggaaacaa

SEQ ID NO: 252628 - RNA, 63 nt, Homo sapiens
gagagacaagggcccggaaagccaaggaacagagcagaggaaggcacaccaggacaaccccca

SEQ ID NO: 252629 - RNA, 86 nt, Homo sapiens
cgcccccgccaggagacccagcaccaagcagcaggagcagcccgcggcgaccaagacaggaaccgcccgaggagcaaaaacgagag

SEQ ID NO: 252630 - RNA, 90 nt, Homo sapiens
ggagaagcaggagcccaccggcagaagagccagaagcagcaggaccggcggaggagcgagagcaggacagaggaccagcgacaaaccgag

SEQ ID NO: 252631 - RNA, 73 nt, Homo sapiens
aaagcccggaggacgaaacgcgaaacccgggccaaaggcagaaggaacacaggaccaggccaaaaccaggacc

SEQ ID NO: 252632 - RNA, 59 nt, Homo sapiens
cccacccagaaagagcggaagggaaccccccaacccaggacccgccgccacaaggagcg

SEQ ID NO: 252633 - RNA, 83 nt, Homo sapiens
cagcacggaccaggaggcgagcaacaggccaccagccagcccaccccagacggggggcgacggcggcgcacagagagaagacc

SEQ ID NO: 252634 - RNA, 81 nt, Homo sapiens
agcgcaaggaggccgcacccaaggccgcagacaaggagcgggaaggcagaaacacagacgagagaaagaaaaaaaaaggca

SEQ ID NO: 252635 - RNA, 76 nt, Homo sapiens
aagcagagggcacccaccggaccgagccagggcccaaggccggccaccagggcccggcgccccccggcccacacag

SEQ ID NO: 252636 - RNA, 77 nt, Homo sapiens
cgggcgccgggccaggacgggggcgggaagaagcccgccgccaccaccccaccaccagcgcagcagagaagaaaaga

SEQ ID NO: 252637 - RNA, 88 nt, Homo sapiens
cgcccgcagagccggcgccgcgcacgccgcagacgccgccaccgccagggcccgagggacccccgccaagagaccggagaccagccac

SEQ ID NO: 252638 - RNA, 51 nt, Homo sapiens
gccgcgacaagacacgggagcccgggaacggagggaacggcaccacggcaa

SEQ ID NO: 252639 - RNA, 100 nt, Homo sapiens
gcggcaaccaacgcagagcacccggcgagacgagaacgcagaggaaccagaggagggaccgaacaggacgccacggggaaccagaacacaccggagccga

SEQ ID NO: 252640 - RNA, 71 nt, Homo sapiens
acaccgccgagaccagcccaacaggaccaggagcgggagagggccagaagcaagaaaggacagcaaagcga

SEQ ID NO: 252641 - RNA, 72 nt, Homo sapiens
cgccgagcaacaaccgccgagcgggcggagaacggaaaagcaccaggaagcagagaggaccgcagaagggaa

SEQ ID NO: 252642 - RNA, 58 nt, Homo sapiens
gcgagcagccaggcggcgggccaggggcaaagaaaaaggagagaaaaagaggcaaaac

SEQ ID NO: 252643 - RNA, 70 nt, Homo sapiens
gcccccgagacgggaacagaggaggggacgcccccagagcgagggccgacaggcacaggccaggcgaacc

SEQ ID NO: 252644 - RNA, 75 nt, Homo sapiens
cccaagaagcacccgaaaaaagcacgaggaggaccaagacagggaccccacaacagagcgccaaaaagaggaccc

SEQ ID NO: 252645 - RNA, 77 nt, Homo sapiens
ccagggggagcgggcggcagcggaccgggagaaccaggccgaagggggccggagcagaggccaggaggggcccagcc

SEQ ID NO: 252646 - RNA, 55 nt, Homo sapiens
cgcgaggaggaagcgcccggccggagccagggacaagggccaaaccgagcgccgc

SEQ ID NO: 252647 - RNA, 82 nt, Homo sapiens
gacggagcacgacaacggccacggggcaaccgccggggccggaccaggaacgcaccaagaagaagcgccggggggaccggac

SEQ ID NO: 252648 - RNA, 69 nt, Homo sapiens
gcgacaggggaacagacagaaggagcaggaaccaaagggaaccaccggacaaacaccggaaaccacaag

SEQ ID NO: 252649 - RNA, 58 nt, Homo sapiens
agcagagacgaaccaggcaaagccaagcaaggcggacaagaccaagcgagcaggaaaa

SEQ ID NO: 252650 - RNA, 78 nt, Homo sapiens
ccgaccagccgcggagccgggggcagggcagcggggaagaagaaaaggaaccgaggccccccggcgacacggcgaaga

SEQ ID NO: 252651 - RNA, 84 nt, Homo sapiens
gggccccagccagaaccggaggcggaaggccagccaggcccgcccggccgcgcggaccaacaccccgcagcaagaacccaagcc

SEQ ID NO: 252652 - RNA, 81 nt, Homo sapiens
cggcagcagcagcggagcgcccaaggaggaaaccccccaggcaagaggcgcaggaccgggaagaccaacaaacgcaccgcg

SEQ ID NO: 252653 - RNA, 75 nt, Homo sapiens
ccacagggagaacagggcagaacgaggggaggaaagcaggcccacacccaccccccaccacggcagggagcaggg

SEQ ID NO: 252654 - RNA, 76 nt, Homo sapiens
caggaagaaacgaggccagacaagggcagaggcgagagccccgaaggaaacaagggaccagccccgacgccagcca

SEQ ID NO: 252655 - RNA, 73 nt, Homo sapiens
gacccaccacaccacgggcggccccagaagggccacagagcaaccaaaaaccggccgcaggcacaaaagaaga

SEQ ID NO: 252656 - RNA, 56 nt, Homo sapiens
agcagagcgacagcggcgagcagaacacggcgagcggggaaagaaccccgggagcg

SEQ ID NO: 252657 - RNA, 74 nt, Homo sapiens
cccacagccacggcgccggcaacagaccacccccggagcggcccagcccagcgcccgacgccacccacccccgg

SEQ ID NO: 252658 - RNA, 71 nt, Homo sapiens
cgacaaccgggcagccaacgggcagcgaaagcaacagcccaccggacgggagggacccaggggaacaaaca

SEQ ID NO: 252659 - RNA, 75 nt, Homo sapiens
cgcgccccgggcgcagggagccggcaggggccccaggcagccagcagcccccacccggacgcagcacgcaagcag

SEQ ID NO: 252660 - RNA, 72 nt, Homo sapiens
ccggggagcagagccggaagcggcaggccacaaagccacaggccgacaccggaccaaccgcgggggggggga

SEQ ID NO: 252661 - RNA, 76 nt, Homo sapiens
aagaaaggaagaacagaaaccaagccaacaaaagaagcgccacaggaggcagaaagcggaaggcaggaaggcgagc

SEQ ID NO: 252662 - RNA, 75 nt, Homo sapiens
aagccaaggacgcagcaaagaacaccagacaggcagagaccacagcagaccccaggcccacgagaacaagagcag

SEQ ID NO: 252663 - RNA, 73 nt, Homo sapiens
gaacagaacagcgaaacaagagggcaaaacaaccgaaccccgcacagaacagccacgggcaacagagcaggac

SEQ ID NO: 252664 - RNA, 77 nt, Homo sapiens
ggaccggggccccggaacccgagcggagcgaagcgcaggcgcggggcgcggagcgggaggaccgcacaggcgcaggc

SEQ ID NO: 252665 - RNA, 89 nt, Homo sapiens
gacaacggaagcagaaccgcgggccacaccaggccggggagcggcacggcgaggcccgcaagcgcaagggaacggcaggagcagcgagg

SEQ ID NO: 252666 - RNA, 90 nt, Homo sapiens
ccgcaccagccgcccaagccgcacagccgcggcggcagcagcaggagaggagacgacaccaagaggaaaaaccaggcaaggaagcacaag

SEQ ID NO: 252667 - RNA, 53 nt, Homo sapiens
ccagccgcaagcagcccccaggacagcggcccaaagcaagacccgacacagac

SEQ ID NO: 252668 - RNA, 82 nt, Homo sapiens
aggcagccccgcacgagcggcaaccgaaagccagcagcgggagacgggaccaaaagcaggaaaaagaaaagaggaagagcgg

SEQ ID NO: 252669 - RNA, 75 nt, Homo sapiens
ccgagacaacagaacgcgggcgaacgagcaccaacgcacccaccaggccccacccacagagaacaggcaacaaaa

SEQ ID NO: 252670 - RNA, 78 nt, Homo sapiens
ccgacccaacaccaggagacagacgcgagcccacaccaaccggcccacccaccgacgcggcaggacgcgcggaggaaa

SEQ ID NO: 252671 - RNA, 86 nt, Homo sapiens
gcaaaaggaaggagcccgggccccccgcacggaggagaaagccgccagaagcagaggccagggcccgggagcaccgcaccccagga

SEQ ID NO: 252672 - RNA, 101 nt, Homo sapiens
agaacagcgcgagcaggcaaacgaagcaccagcagagcccaccacagagaccgacaaaaaggagaacacgcagcggaaaacagccagcaacacgagaacaa

SEQ ID NO: 252673 - RNA, 66 nt, Homo sapiens
cgagcaccgagaggaaggagggaaaccccagggaagaggaggaggagaaaaagcagcccacccagc

SEQ ID NO: 252674 - RNA, 74 nt, Homo sapiens
acaaggccagagaagaccggaaggcgcgcgccgccacgccccaacgccggaaacccggagcacccaaggcacga

SEQ ID NO: 252675 - RNA, 73 nt, Homo sapiens
caaaagcggaagagcagagagaaggcagggcaaaccagaaagacggcaaggacggggacacaagaccagccag

SEQ ID NO: 252676 - RNA, 81 nt, Homo sapiens
gccaacagggacgcgaaagaacagaggaggggagcgaagaagggagccacccaaaacacgcggaaacgccacaggaaaagg

SEQ ID NO: 252677 - RNA, 90 nt, Homo sapiens
gagcacgacgggccagacggagccaaggaaggcgccacacaagcaccaacagggacgcagcaacgggcaggaaggaaggaaggcaaagac

SEQ ID NO: 252678 - RNA, 78 nt, Homo sapiens
cccggaaccgcgacggcggcagccgagcagaccgggaaccgcaccgggaaagaggaggagcagagacacccagcaagc

SEQ ID NO: 252679 - RNA, 79 nt, Homo sapiens
ccgaccgaagccggaaacgaggcaccagggaagagccagcaaggagcaccggagggcgcccacaagccaccaagaaggg

SEQ ID NO: 252680 - RNA, 80 nt, Homo sapiens
gaagacaccagagacaaaaagggaaaagagcccaacagcaagcccagagccccgcagggagaaaggaagggccaagaaaa

SEQ ID NO: 252681 - RNA, 83 nt, Homo sapiens
gggcaccgcgcgaagcggccaaagccgcccagacggccaccggcgggaggaacaaaaggacggaaggacaccagcacaagcgg

SEQ ID NO: 252682 - RNA, 79 nt, Homo sapiens
gagaaaggaaggaaaaccgacgacacagaagcaagaccaaaaccaagaggcagacccaaaaggaaaacagcccgcccag

SEQ ID NO: 252683 - RNA, 78 nt, Homo sapiens
cgcggccgaaccaaagagcccaaaaggagcccagggaacccagccagcacagcagcagcagccgcccagagacaaaca

SEQ ID NO: 252684 - RNA, 73 nt, Homo sapiens
agacaggaggaggggggcacccggacaggccgccgccggaaaccgacagggcgacccaccaacaggcaaccca

SEQ ID NO: 252685 - RNA, 78 nt, Homo sapiens
cgacaagccgcggcagccgcggaccaccgccgccagggggacgaagggaacccgccgggcggcccggcacccagcccc

SEQ ID NO: 252686 - RNA, 72 nt, Homo sapiens
gagacgggccgcacccgccccccgcgcccgccaccggccgccgcccggggaccccacaccacaaaccgagga

SEQ ID NO: 252687 - RNA, 71 nt, Homo sapiens
cgaaacggaaagaagcaccggagagacagcacagcacccacaaagcaacgagaggagagggggcaaagccc

SEQ ID NO: 252688 - RNA, 71 nt, Homo sapiens
ggacaagcaggaaacaagaaacaccaacacaaaaaaaaccaacagccccccaggcggaggcaaggcgcgac

SEQ ID NO: 252689 - RNA, 75 nt, Homo sapiens
gggagcccgcgcccgccgcgggagagaggacccccccccccccccaagaaaaggaagcacggagaaaaggaggcc

SEQ ID NO: 252690 - RNA, 79 nt, Homo sapiens
ggcagccgcggaccaccgccgccaggggaaaggaaccggaccagacaccgagacaagaagccacccagaggaggaagcc

SEQ ID NO: 252691 - RNA, 77 nt, Homo sapiens
caagaccgaaggggaggaaggccaaagccaagaccgaggggagaagaagagaaccccaagaggagcccccgcgccca

SEQ ID NO: 252692 - RNA, 73 nt, Homo sapiens
aaggggagaaggcaggcaccacaaaaaggacaggaaaacagcgcacagaagcagcagcaaaccgaggaaaacc

SEQ ID NO: 252693 - RNA, 75 nt, Homo sapiens
ggagagcccagccagcgcccggcagcccgacgcgagccgccggagcgaacgggcgccggccgagcccgggaaaac

SEQ ID NO: 252694 - RNA, 62 nt, Homo sapiens
ggaggcccagaaagaacaaagaccaacaaccacagccgcgaaggagaggaaaagaggacaag

SEQ ID NO: 252695 - RNA, 95 nt, Homo sapiens
cccgccccgcccggagggaaagcgggggaggagcgcggcgcggcagaaacccagagagcacaggacaagaagccccccaagaccagcgcgggaag

SEQ ID NO: 252696 - RNA, 79 nt, Homo sapiens
ccagaggcaagccagcacaccggaggacagagggaggagggaaggaacagccccgccacgcagacacaacggcaaggcc

SEQ ID NO: 252697 - RNA, 81 nt, Homo sapiens
cggacggccccccaggggccccagagcccgcgcccgcagcccaccaagccacgccaccaccccagggagcgaagcacaccc

SEQ ID NO: 252698 - RNA, 76 nt, Homo sapiens
accaaaccgcgaagacgaacaaacccacagccagagccagaggaacagacaagagaacccacagcaggccaagagc

SEQ ID NO: 252699 - RNA, 82 nt, Homo sapiens
agcgcgggcgaagcacgcacaccgggcagggccgagaggacgccagcggcgcgcagaaaaagcggggaaggggggcaaaaaa

SEQ ID NO: 252700 - RNA, 70 nt, Homo sapiens
aacagagagcagggagaacacaggaacggaggcggaaagcacagccggcccgaaaggacggcagaagcag

SEQ ID NO: 252701 - RNA, 69 nt, Homo sapiens
cagaaaggcccaccagaaggaggaccggaccagagacgaacacacagaggaagaaaaaaaggaagaaga

SEQ ID NO: 252702 - RNA, 78 nt, Homo sapiens
ggaccccgcggccggggcagcggcgccgcgccgcgcccgagggagaccggaacagaacagcagacgcccccccgacag

SEQ ID NO: 252703 - RNA, 69 nt, Homo sapiens
acacgcccggggcgaggcccgcggggccaggaggacagcaagagcagccccggaacggaggaagggagc

SEQ ID NO: 252704 - RNA, 54 nt, Homo sapiens
acagaaaaaagcagcccggacaggaaagcaccagcaagaaagaaccccccccca

SEQ ID NO: 252705 - RNA, 50 nt, Homo sapiens
cccggcaaagccaaccggggagacaagcacaccagcaaccaacgaccaca

SEQ ID NO: 252706 - RNA, 63 nt, Homo sapiens
cagacgacgccaggacggcaaggcggcacggggaagaccaaaaaaccaaggacgacgggaaac

SEQ ID NO: 252707 - RNA, 70 nt, Homo sapiens
cagaccgaagaacaagcaaaacaggcgacagcagaaggaaaaccacagaccgaggcaagaagagacccag

SEQ ID NO: 252708 - RNA, 79 nt, Homo sapiens
gaggaagcaggacaggacgagagaagacacaagagcaccggagaggagaggcaagagaccgccccaggaggaggacagg

SEQ ID NO: 252709 - RNA, 65 nt, Homo sapiens
aaaccacccagagacagaagagcaaaaggaaccgaggaaaacgagacgacgggaccgaaggaccc

SEQ ID NO: 252710 - RNA, 73 nt, Homo sapiens
cccccagcgccgccagacgaccgcgccacccgcaggggggcagcagaggagaggaggagggaggggaaaagga

SEQ ID NO: 252711 - RNA, 57 nt, Homo sapiens
cagaggaggccccccagccacggaaacaccaaaccgcacaaacaaagccaaggaaca

SEQ ID NO: 252712 - RNA, 82 nt, Homo sapiens
ccgaaaaccaaacaccaagcccacagagggaaagaagaggccccagcacacgcggcagcagaagcagcggccaagaacccag

SEQ ID NO: 252713 - RNA, 72 nt, Homo sapiens
ccacggcgacgccccagcccgcccaaagaaagaaggagggacggacaccgcaaagacaccggcacaggacag

SEQ ID NO: 252714 - RNA, 85 nt, Homo sapiens
agccgagcgcaacaccccgagccagcgagccagcgagccgccgacccgccgagcaaaagaagggaaaaagcccacaaaggcaagg

SEQ ID NO: 252715 - RNA, 79 nt, Homo sapiens
aagaagacgaagagccgaggccgccgaagcaggccggccagcgccgccagaagacgaccccgacgcaggccaggagccg

SEQ ID NO: 252716 - RNA, 74 nt, Homo sapiens
cggaaaaacacaggaaaaacccacccagaaagagaccgaccaagggaagaccaacggaaaccacagaaaaacca

SEQ ID NO: 252717 - RNA, 84 nt, Homo sapiens
caaggccacgacccacgagacaggggcccaagaaaaagcaccggaccagcccaggggcacgggcacagcccagaagaccagcga

SEQ ID NO: 252718 - RNA, 59 nt, Homo sapiens
ccacacagagcaacacaccaacccgggaccaagaaaggcccagggaccaaagcccggac

SEQ ID NO: 252719 - RNA, 106 nt, Homo sapiens
gccgacagcccggggcagcgagccagcaccgcggaccgccaaggagacgcacaggacacaagcagaagcggaggagcggcgcgcgcagacgcggagcagccacaga

SEQ ID NO: 252720 - RNA, 76 nt, Homo sapiens
ccgacagggacacagggagccccagacccacagaaagcacaccacgaggcacacgaagcacaccaaaaaaaaacca

SEQ ID NO: 252721 - RNA, 64 nt, Homo sapiens
gaaccggcaccgcacaccggaccaggaaacggaggcgggagcggacgggcgagggaggaagggg

SEQ ID NO: 252722 - RNA, 79 nt, Homo sapiens
caggaagagcggccagaggccagcaggccacgcaaggcgaaccacgggaacaaaggcgaggacaaggagggcaggggac

SEQ ID NO: 252723 - RNA, 79 nt, Homo sapiens
agaccagaagcaaagacagcccaaccaacccaccagccagacaacacaagaagcagaggcagcgacagagaaaaccccg

SEQ ID NO: 252724 - RNA, 79 nt, Homo sapiens
gggcccgaggaggcagccaagccgggccgcccgcggcaaacaacgaccgggagcagaaggcagcccaaggaggaaaaga

SEQ ID NO: 252725 - RNA, 60 nt, Homo sapiens
ccccgcggcgggaggagccgccccgaggacaaaagccacgaggcacaaagaggagacagc

SEQ ID NO: 252726 - RNA, 78 nt, Homo sapiens
ggccggccgggccagcacccggccgagacggcggcagcagcggcacaggaagcccggggcggcgacggagcacgaccc

SEQ ID NO: 252727 - RNA, 100 nt, Homo sapiens
ggagggcagcgcagccacgccccccggaccgccgcagccgggcccggggccgacagccccccaggcccgggaggagcggggacacgaggaccccccaaag

SEQ ID NO: 252728 - RNA, 58 nt, Homo sapiens
cacccccaccggaggcgccggcggcagagcggggagacgagacaaccgccccgccgcc

SEQ ID NO: 252729 - RNA, 72 nt, Homo sapiens
cgggggcagggaggaggcagcaggaccagacacgaggacgggcaggcccaggaggagagaaagaacccacgc

SEQ ID NO: 252730 - RNA, 77 nt, Homo sapiens
ggggcggggaagcggaccagaaccggcgcaacaccccagccaaagccaacaagaccaagcccgcggacgccaggggc

SEQ ID NO: 252731 - RNA, 57 nt, Homo sapiens
gccgaccgcaagcagccagacccagccgggccaccgagggagcacagcgcggaagcc

SEQ ID NO: 252732 - RNA, 68 nt, Homo sapiens
cacggacgcaccccacgggaacccacgaccaaagcggaaggccgaacagagacagacccgggggcccc

SEQ ID NO: 252733 - RNA, 76 nt, Homo sapiens
caaacgcagaaggacgcccacgagcaaccaagaggagcgggaaacgcacaacagagaacagaaaagacccgcagac

SEQ ID NO: 252734 - RNA, 72 nt, Homo sapiens
cagcacagcacccacaaagcaacggccaggcagcgccaaggaccgggacagacaaacccaaaagaccccgca

SEQ ID NO: 252735 - RNA, 75 nt, Homo sapiens
aagagaaggacacggacaaggaagggcgaggacagaacgacacaaaagggaagggagccggcagaagggaccaag

SEQ ID NO: 252736 - RNA, 68 nt, Homo sapiens
gagaacggcaccccagaagggggaagccgcaaaccagcaaggcccaaaaaagaaccagcaagaagagg

SEQ ID NO: 252737 - RNA, 79 nt, Homo sapiens
cacgcagagccgacgaaaccccaggaggagacaaggagacaagggagcaaaaagcaagaaaaaagagggcgcagaacga

SEQ ID NO: 252738 - RNA, 79 nt, Homo sapiens
aacgcgacgcgagagaaggacccacggcgcgcgaaggggccagacccagaggcacgcagggcaggaggagccaggcgag

SEQ ID NO: 252739 - RNA, 80 nt, Homo sapiens
cagcacacgcaggccaggcggggaccagaggaacacggcagcacagcgccaagcacaagcagcaggagacccagaaacag

SEQ ID NO: 252740 - RNA, 93 nt, Homo sapiens
aggccaggaacaccaccaaagggcagcgcgggcaccgcacacagaaccggggggcggacgaagcaggacacaccgaacacgcacccgagccac

SEQ ID NO: 252741 - RNA, 80 nt, Homo sapiens
cccaagggcgaaaaaaaagggaagaggagacaccccgggggccccgagcaaaccagggggggcaagccggggcacaggac

SEQ ID NO: 252742 - RNA, 78 nt, Homo sapiens
caaacacacagaaaaaccccaaaaaggcacaccggacaaggacaaacacgcagcgaaggagccaaccaggagaggcgg

SEQ ID NO: 252743 - RNA, 78 nt, Homo sapiens
cccgcgacccgagacagccccaagacaaccccaccagcaccacaggcacccggcccccccgccaggaaccggggccgg

SEQ ID NO: 252744 - RNA, 72 nt, Homo sapiens
gagaagcaaaacccagagaagagagaagaacaccgaaaccagaagggccccagcgaaagcaacaaggccgcc

SEQ ID NO: 252745 - RNA, 74 nt, Homo sapiens
gggcgcacacaacgggagcccgaggagaaggggcacgggccccacagccggaacccccagacccaagcaaggag

SEQ ID NO: 252746 - RNA, 75 nt, Homo sapiens
gaagaagcaggaggcaagaaaggggaaccccggagaaaaggccaagaaggcagaaacaagggacgaacaaaacac

SEQ ID NO: 252747 - RNA, 74 nt, Homo sapiens
ccgcgacgccggcccccgcagcaacaaccagggcgccaaagaggcaaaagcagaccggaaaacccaccggcaag

SEQ ID NO: 252748 - RNA, 59 nt, Homo sapiens
gaaaagcgcagcgagcggagccgccggagacggcaaacaaaggaacagaggcacgcgga

SEQ ID NO: 252749 - RNA, 81 nt, Homo sapiens
aggagacggcggcggcgagcggcggacaggggcgggcacaagggaagacagcgcccgggacccaacggaagaggcccaaga

SEQ ID NO: 252750 - RNA, 40 nt, Homo sapiens
cagcccgggaacagcgagaggacgacgaacacccaggcag

SEQ ID NO: 252751 - RNA, 77 nt, Homo sapiens
gaagaaaagaacacaaaacgcagacaggggcaaggccgaggggaacagcacacagagaggaggcggaagcacgccag

SEQ ID NO: 252752 - RNA, 74 nt, Homo sapiens
gcccgccgaggcccggagggagagaagggcggagaacggaaaagcaccaggaagcagagaggaccgcagaaggg

SEQ ID NO: 252753 - RNA, 73 nt, Homo sapiens
ccaaacgcaaacaagcggaagacacaaacagcagggagaagagacaacaagacagcaaggagcagggacaaga

SEQ ID NO: 252754 - RNA, 38 nt, Homo sapiens
ggccgcgaaggcgccgacaggacaaaaacgcggagggg

SEQ ID NO: 252755 - RNA, 93 nt, Homo sapiens
cgcgcgaagggcccgaacaaaaagaagaaacacgacaagcaaggggagccgccaccaaaagcagacggaaaacccacggggaagaccacaccc

SEQ ID NO: 252756 - RNA, 103 nt, Homo sapiens
gaaccacccgggaggcgccagggcagcgggagcacagcggcgggcgggcaaggcgaggacacgagcccagccaggcgagccagcgccaaagaaaaagaacaag

SEQ ID NO: 252757 - RNA, 74 nt, Homo sapiens
gcgcacaaccagcccaagaaccagcccaggacacagccgacaggcagcaaagaagcaggggaagcgcacaaaaa

SEQ ID NO: 252758 - RNA, 74 nt, Homo sapiens
gggagagcagggggagaaagcggcgcgacacacccgggccagaccagagggggagcggaggcccaagacggcag

SEQ ID NO: 252759 - RNA, 73 nt, Homo sapiens
agcacaagccagcaaagcaacaagacaacaggcacaaagagagaaggaacacccacagggcagacagagaaag

SEQ ID NO: 252760 - RNA, 50 nt, Homo sapiens
ccgggcggggaaacccggaccggaggacacgggcgaggacaacaacggaa

SEQ ID NO: 252761 - RNA, 74 nt, Homo sapiens
agagagccgaggcgccccgcgggagaaggacccccgcgccgagaaggaacagaacagacaccaccgaaacgcgc

SEQ ID NO: 252762 - RNA, 77 nt, Homo sapiens
agaaaggacaggacggcggaagagccggggcccagacagaaagaaaaaggacgcggcaggaacggcacaccaagacc

SEQ ID NO: 252763 - RNA, 65 nt, Homo sapiens
cgcaaccagggcacggagacaccagggccggggacacacaaaaaagacgaggaccagagggagca

SEQ ID NO: 252764 - RNA, 78 nt, Homo sapiens
cccgagaggcacacccagccaccagccaaggacagagggcaagagagacccagccaaggcgggacaacccaaccgcag

SEQ ID NO: 252765 - RNA, 56 nt, Homo sapiens
cagacacgcgacggaacagcgaaacgccccagcacccagcccccacaacacccgcc

SEQ ID NO: 252766 - RNA, 85 nt, Homo sapiens
cgacagagacccggggaccgcggagaccgccaccaggcccggaaggagacccaacaccccggccagacgggccaccaggccggcg

SEQ ID NO: 252767 - RNA, 72 nt, Homo sapiens
gccaaagcacaagaagaagacgagggaaggagaacagagggaaaaagaccagagaaagggggggaggaaggg

SEQ ID NO: 252768 - RNA, 81 nt, Homo sapiens
agaagacacaaaggacggaggcacgcccagaggagaggaaaacgaagaaaagggaaggcaaaagcccgaaagcagagggag

SEQ ID NO: 252769 - RNA, 66 nt, Homo sapiens
ggagagccgcggacacagcgaaccaagccaacggaaaggcaccgagcagaaaagaacacagcgggg

SEQ ID NO: 252770 - RNA, 82 nt, Homo sapiens
agcgaggacagaaggaagaacgcagacccagcagcccagcgccgagcgcagggacagaggacgcggccccagagcccccgcc

SEQ ID NO: 252771 - RNA, 90 nt, Homo sapiens
caacggaagcgcagcaacagcaagccccgggcaggcaagcggcaccacgacaaccccacaccaacgagaggcaacgcgaggagggcaacg

SEQ ID NO: 252772 - RNA, 68 nt, Homo sapiens
agcaggcggagaaagggaccaaaggggaggaggcaggaacaagagaaaaagcacaacaaccagaagcg

SEQ ID NO: 252773 - RNA, 74 nt, Homo sapiens
gggcccaggccgcagccgacccaacaggcgggcgccaggcaccagaacaccaaaacggcgggagcgccccgcag

SEQ ID NO: 252774 - RNA, 75 nt, Homo sapiens
cgccagaaaggacaaaaccgggcaaagccaagacaaaaccaaccccccccaaaaggaagggcggaaggagacaaa

SEQ ID NO: 252775 - RNA, 69 nt, Homo sapiens
gcgcacccagcgcaggaaggccgcggacccccccccccccaccccacaggagaagagacgaaagaagac

SEQ ID NO: 252776 - RNA, 81 nt, Homo sapiens
caaagccaaaagaaggcccgggaaagcacaaagcaagagacagcgaggacagaaggaagaaagcaggagcccggaaaggag

SEQ ID NO: 252777 - RNA, 74 nt, Homo sapiens
caccgccccacccagcacgccacagccgagccacaaccccgcacgaaacgcgacagggacggagaggaccccca

SEQ ID NO: 252778 - RNA, 72 nt, Homo sapiens
ccacccagaccagccccaggggaacagagcagcccgacggccaggaggcgaagagacgaggaagcccaggag

SEQ ID NO: 252779 - RNA, 38 nt, Homo sapiens
gccacaggagagagcaaggggccaagcgcagggaagga

SEQ ID NO: 252780 - RNA, 55 nt, Homo sapiens
aggagaggcgggaacaaaccgacccagagagacaggcacagggaaagggacacgc

SEQ ID NO: 252781 - RNA, 86 nt, Homo sapiens
cagccgcggagccacggccaagcgggaagccggcgcaacccgcaccgcagagccggcgcccccggcaggccccacagggcaacgcc

SEQ ID NO: 252782 - RNA, 60 nt, Homo sapiens
agcaggacaaacgcacccggcgaagaagacgaccccgacgcaggccaggagccgcggaca

SEQ ID NO: 252783 - RNA, 78 nt, Homo sapiens
aaccacagccgcacaaacagaggaaccgccaagagcggacgaaggcgcgacgccaaggcacgaggaaggaaaaggagc

SEQ ID NO: 252784 - RNA, 79 nt, Homo sapiens
ccggcccggggcccgcagggggcacccggcaggaacgaagagcaggcaccagacgcagaacgaaaaaggaacacgaagg

SEQ ID NO: 252785 - RNA, 76 nt, Homo sapiens
aagcaaacaaaccaagaagaaaggagcagagaggagggcaaccagaccaagaaacgaggagcagcaacagaggccg

SEQ ID NO: 252786 - RNA, 73 nt, Homo sapiens
cgaaagcagaagaaaagggacgcaagaaacccaggacgagaacagcaacaggcggaggcgaccgggaaggaga

SEQ ID NO: 252787 - RNA, 85 nt, Homo sapiens
aagagaagcaggaaggaggcagaggcacaccgaaagccaccggggaccgcaaggccgcggggcccaacaaggcaagacacagcgg

SEQ ID NO: 252788 - RNA, 85 nt, Homo sapiens
aaacccagacacaagaaggccaagaaccgagcaaaaaccagggcgaacgaccccggccccccaccacccaacccccccaaccaga

SEQ ID NO: 252789 - RNA, 74 nt, Homo sapiens
gaaagaagagcagaacacaacagcaaccagcacagaaaggaagccccagcaagacccggccagagcagggcagg

SEQ ID NO: 252790 - RNA, 71 nt, Homo sapiens
caaggcgcaggaagccagccgcgccgacagcacgcagagcggagaagccccagaccaggggcccggcagcg

SEQ ID NO: 252791 - RNA, 71 nt, Homo sapiens
caaaccaagaccagaagaccgacaggaggccccggaagacggccgcccacgcggggaccgcacgacacggg

SEQ ID NO: 252792 - RNA, 76 nt, Homo sapiens
ccgggcacgagcaccgccaccaggggaaggggacaacacgcggggccgggagacagagaaacacgaaagcagggag

SEQ ID NO: 252793 - RNA, 84 nt, Homo sapiens
cgcgcagagaccccgcaggcacaggcaaagacacggggaccaccagcacggacacaagaggaagcggaaaccagggccacagca

SEQ ID NO: 252794 - RNA, 75 nt, Homo sapiens
agggcccgagcgaccagaaccgcccaggggccggcgccaggccggggcacggagggcagaagccgcaggacagaa

SEQ ID NO: 252795 - RNA, 71 nt, Homo sapiens
ggacgcagcgaaggccaagcggccaggcggccggccccacagggcccacaagacccccaaaccccggcacc

SEQ ID NO: 252796 - RNA, 79 nt, Homo sapiens
cagaccggacgggacgccccggacagagcccaaaaagcacacagcacccgaaaggacccggcacgaagacacaagagaa

SEQ ID NO: 252797 - RNA, 75 nt, Homo sapiens
gagaaccgcaggagccagaggggccggacggccagcgcccagacccaaggggcagcccacgcggggacccgcacc

SEQ ID NO: 252798 - RNA, 73 nt, Homo sapiens
cacgaaaaaacccagaacacgggagaaaaaggaaaacgcggaaaaccgacacaacagaaggacgagaagggcg

SEQ ID NO: 252799 - RNA, 73 nt, Homo sapiens
aagaccacagaaaccaaaacaaagcagacaaaggagagacagcacaaccaggggcgcaacccagcaagagaag

SEQ ID NO: 252800 - RNA, 116 nt, Homo sapiens
ggcccccaccgcaccaccgcacccagggccccccccaacacaggggaagccagagagcccaagagacacaggcagaagaagaccgcaaggaagaagagggacaggcagagcaggcc

SEQ ID NO: 252801 - RNA, 77 nt, Homo sapiens
agaggaaggagaaaaccacaaggaacacgaggaaggaagaaaccgcaacaagccccaccccgaggcagaaagagcaa

SEQ ID NO: 252802 - RNA, 83 nt, Homo sapiens
acaggacaggagagaaagacgagccccagcccccagcagccgacaggaggcccgcaagagcaggcaggcagccaccccaggga

SEQ ID NO: 252803 - RNA, 72 nt, Homo sapiens
ccggggcccgccgggccaaccgaaaggcccagggcgacagccacccgaaccaaacacagccggagccgacgg

SEQ ID NO: 252804 - RNA, 39 nt, Homo sapiens
cgggccggcccgcggaagaagcaaaaaccaggggaagac

SEQ ID NO: 252805 - RNA, 83 nt, Homo sapiens
gcgagagaagcggcggaggacgagcccgggagcgacccgcgcaaacaaacagcgaagagagagaaacgaaaaagaggaaggag

SEQ ID NO: 252806 - RNA, 54 nt, Homo sapiens
ggggagagggaccacacagaaacggaaccgagcagagcggagaacaagcaaaga

SEQ ID NO: 252807 - RNA, 66 nt, Homo sapiens
gcgccgagaagccagcacgccgggagcggacacagcccaggggcaagggaccccaagagaaaacca

SEQ ID NO: 252808 - RNA, 71 nt, Homo sapiens
ccggaaaagccaacgccggcgaagaccaccagcccgcgagacaaacccggggaaacagaaagcggcacccc

SEQ ID NO: 252809 - RNA, 91 nt, Homo sapiens
ccgggcggggcggcggcgacgcggaccgcggacagcgaacccggagaaccccacacggacgccggaagagccacggcggggaggggccagc

SEQ ID NO: 252810 - RNA, 71 nt, Homo sapiens
agcagacgcagccgagacaccagcccgaaacaccaccaagagggaaggggaacaggaccggccacagacag

SEQ ID NO: 252811 - RNA, 72 nt, Homo sapiens
gggcaccggaggaacgaggaaggaagacccggagggcaagaaggaccgaggggaaccaagaagaccgaggaa

SEQ ID NO: 252812 - RNA, 80 nt, Homo sapiens
agcgagcgcggagcccgggggaccgggagaccgcaggcgggacaagaaaagaaaaagcaacagaaaaacaaccggaagcc

SEQ ID NO: 252813 - RNA, 78 nt, Homo sapiens
gcccgggacccaacggaagggacgaagaaggcgccagaccgggaaaggcagaaaggcagagaaacccagcccagagac

SEQ ID NO: 252814 - RNA, 74 nt, Homo sapiens
gaaacgaaacccacaagcccacaagaaagaagaacgagacagacacaggaggaagcgaaccagaggcccaacaa

SEQ ID NO: 252815 - RNA, 60 nt, Homo sapiens
cggcagccgcgccacgccagggccggcaagagaagacaagaccccagaaaccaaaagcca

SEQ ID NO: 252816 - RNA, 62 nt, Homo sapiens
cacaggcgcaccagcaccacagccaaaagcaccacaagacaaaagaacgcaaggcaaggaga

SEQ ID NO: 252817 - RNA, 69 nt, Homo sapiens
ggcacgcgcagcgcgccaccgcaccccgggacgggaacgacccagggaccagcggccgagaagaggacc

SEQ ID NO: 252818 - RNA, 80 nt, Homo sapiens
cgaaaccacaaggccgagggcccgcgcgcgggggcgggacccacaccagaagggagggcaggggcaccacggagcccacc

SEQ ID NO: 252819 - RNA, 71 nt, Homo sapiens
gagacaagagaggagacccaacagacggcaaccagccaggaaaaccgagccgccgacagaaggagcacaag

SEQ ID NO: 252820 - RNA, 56 nt, Homo sapiens
agagaccgggagcgaaagaagagggaagcaaacgcccaaggagaaacacaaccagg

SEQ ID NO: 252821 - RNA, 79 nt, Homo sapiens
acaccccccagcacaacgcagcaacaaggcaagaacgccccggcaaggacggaggcaggcaccaccaacagcggggaaa

SEQ ID NO: 252822 - RNA, 93 nt, Homo sapiens
aggaggccaccagcccagccccgaaggcccgcggagacgagaccaacacagaaaggggaggccacacaggaagaaaagaagcgcaagaggaaa

SEQ ID NO: 252823 - RNA, 75 nt, Homo sapiens
ggaaggcccaggagacagcggagaaggagcagagccggggagcccgggaccagggccagggacgcccgcgacccc

SEQ ID NO: 252824 - RNA, 89 nt, Homo sapiens
gcgcccgggacgcgcggcggcaccgggaggccgggccgagcgaggaaacggagggagcggccggaacccaagccaggcgccaagacggg

SEQ ID NO: 252825 - RNA, 36 nt, Homo sapiens
agaagcggcggagggagaaggacaacaacgcagggc

SEQ ID NO: 252826 - RNA, 76 nt, Homo sapiens
aaacaggacccgagcgaagccaagccgggcggcagcaaagggaagcggaggaacaccacccagcgcaggaagaaca

SEQ ID NO: 252827 - RNA, 78 nt, Homo sapiens
ggcagccccgcccgcaaaggcaggcaccagaacgaaaccccaacaagaggacccaaagccacaacccagaagcaacag

SEQ ID NO: 252828 - RNA, 68 nt, Homo sapiens
aacaagaagcacacacaaagaaagaagacccggccagccaccggaggggcacccgggggagcgcccag

SEQ ID NO: 252829 - RNA, 89 nt, Homo sapiens
gccggagcagccgcgggcgcccgaggggccgagcgagaagcagaccccacgagcgaaagggaaaaaacgaaggaggcaggaagagcgga

SEQ ID NO: 252830 - RNA, 87 nt, Homo sapiens
gcaaaaaaagagcccgcaagaagaacagagacagcagccaaacccccaggaagcgagcagcgcaaagcacaaagaacgcacaccacc

SEQ ID NO: 252831 - RNA, 82 nt, Homo sapiens
acgcaccaccgccagcccaggcaaacacgccaggagagagggcaagcaagcccacaagcggaacaaacggaaagcgaccgaa

SEQ ID NO: 252832 - RNA, 45 nt, Homo sapiens
aaggccagaagccaggacaggacaacaacaccccacacaaagcgg

SEQ ID NO: 252833 - RNA, 80 nt, Homo sapiens
agccccgggccaggcaagcgggggagcgggaggagccagagcacaccgcaccacggccacaggcgcccgaagacagggcg

SEQ ID NO: 252834 - RNA, 83 nt, Homo sapiens
gggccccagggcgcagacaaggcaggaggaccacagggcacggggaaacggcacccagaagaacaacgcgccacgcaaaaaac

SEQ ID NO: 252835 - RNA, 75 nt, Homo sapiens
ccgacgacccagaccaagagcaccgagcaagaaacaaaaaaaaccagccacacagacaagcagaccggaagaccg

SEQ ID NO: 252836 - RNA, 77 nt, Homo sapiens
ggaggagcgcggaggcagagcaggccaccgaagcaggcccacaccaccgggacccagaacacaggagagcggagcaa

SEQ ID NO: 252837 - RNA, 72 nt, Homo sapiens
gaaaaagggagccgcacccacgacgagaaaaaaacccccaccaaaggccacgccgggcagagcgacggcgac

SEQ ID NO: 252838 - RNA, 76 nt, Homo sapiens
caagacggcaaagccccccagaagaccagggaccgggggaacagaaagcaacgaggccgcaaagcaacgggacggc

SEQ ID NO: 252839 - RNA, 53 nt, Homo sapiens
gccgggcggggagcgcgacgggggacgccccccggaaaaccacacgagaggca

SEQ ID NO: 252840 - RNA, 75 nt, Homo sapiens
aaagaggaaagaagaagccgggggacccaaggcaagaacggaagcacgggcggaggaaagcacaagcagagcccc

SEQ ID NO: 252841 - RNA, 79 nt, Homo sapiens
agcaccgaaaacaccaggaaagacaggagaccaaaaagaagaaccggaagcccagccagggacaagcacccacagagac

SEQ ID NO: 252842 - RNA, 39 nt, Homo sapiens
acgcagaaggaccggccacgggggcgaggaagagacagg

SEQ ID NO: 252843 - RNA, 67 nt, Homo sapiens
gaggccagagcagacgaagaccaacgaaagaaaacacacacacacaaaaacccaaaaggaaggaccc

SEQ ID NO: 252844 - RNA, 85 nt, Homo sapiens
agaggaaaagccaaggaacaggaggcgcagaggcggagcaaaagaagggaaaagaagcaaagaaaagaaacaaacaaaggaaagc

SEQ ID NO: 252845 - RNA, 75 nt, Homo sapiens
gaagaggaaaccaagaaagacaacaagagcgccgacaggaaaagggcgaagcagcaaaacacacagccccccgga

SEQ ID NO: 252846 - RNA, 79 nt, Homo sapiens
ggaccacaaagggaagagccggccaaaaaacaacaaggaagccaggagaagagaaaagggaaggcacggaggaagcccg

SEQ ID NO: 252847 - RNA, 67 nt, Homo sapiens
ggcggaacggagcagcggcgccgggggagaccaggaaggaaagaagccacaggaacggccgaacaca

SEQ ID NO: 252848 - RNA, 74 nt, Homo sapiens
aagaaagccagggccaggcagagacccgcccagaaaccaacagaagaaggggcggcaaggagccaacagaagac

SEQ ID NO: 252849 - RNA, 59 nt, Homo sapiens
aaacgcacaggaagagcgagaaacgcggaaagaagcagaagaacgaaaacaaacggaag

SEQ ID NO: 252850 - RNA, 93 nt, Homo sapiens
ggagggcaccaagacagaggaccaaagaaagaggaaggaagagcaccgacacaaagaggacccgagccccaaagacagaaaagccccgagacg

SEQ ID NO: 252851 - RNA, 43 nt, Homo sapiens
cgcagaggaccaccagaccaaaaacagcgcccccaccagcaca

SEQ ID NO: 252852 - RNA, 80 nt, Homo sapiens
cccggggacccccgacgccaggcagcgcccccaaacgggggagcagggcgggaagacagaaaaacaaagaaagacagacc

SEQ ID NO: 252853 - RNA, 99 nt, Homo sapiens
gggcaccggagcgacagaaaacggaacaagcggaggacaccgagaccagcagccccagggaggcaaccagaaagggccgcaaagcagacgcgccaaaac

SEQ ID NO: 252854 - RNA, 84 nt, Homo sapiens
caagaccgcaaaccacacgacccaggccccggcaacccaggaagggaccacagaccagcacgccggcgccacgaaccgagcgac

SEQ ID NO: 252855 - RNA, 78 nt, Homo sapiens
ggacgaaggccgcagacgaaggggaaagggaagcaagagccagacccaaagaagacccagagagaagacagacgccac

SEQ ID NO: 252856 - RNA, 45 nt, Homo sapiens
ggcagccagcagggggaggcaccccccgagcccagcccacacacc

SEQ ID NO: 252857 - RNA, 73 nt, Homo sapiens
ggagccaacaggagaccgagaacacaccgaaacccaccacagcggagaagagaacccgaccgaagaaggaaca

SEQ ID NO: 252858 - RNA, 76 nt, Homo sapiens
agcccgccacacagagaggccacgacgcacagccacaggaggcccacccccacacagggacaggagagcggcccaa

SEQ ID NO: 252859 - RNA, 72 nt, Homo sapiens
gagaaaaaggcacaggagaaagaaaacaggccagcccagaacaacgaacagaaaaggcggaacaagacagaa

SEQ ID NO: 252860 - RNA, 76 nt, Homo sapiens
cggggggcggggacccggagcaagcagcgacgccagcggcggagaaccgacgaaaggccacaacgcaagaaaggag

SEQ ID NO: 252861 - RNA, 80 nt, Homo sapiens
accgaaaccggaaccaaagaaagccagccgaaacaaaaaaacgagcaaaggcagaaaaaggaacggaacagcggaaggca

SEQ ID NO: 252862 - RNA, 56 nt, Homo sapiens
cccagccagccaccagccggagcaaggcagaaccagagaccacagaagaaggaagg

SEQ ID NO: 252863 - RNA, 50 nt, Homo sapiens
aaggaccaagaaccagcgcggcacgaagacccgaagaaacacacgggcag

SEQ ID NO: 252864 - RNA, 77 nt, Homo sapiens
ccggaacagcgccgaggcccaaggcagaggcgaggcggaagggcaccccacccggcagccgccgcaaagggacgacg

SEQ ID NO: 252865 - RNA, 78 nt, Homo sapiens
ccaaagaaggcaaggagagaagagaagaacagcacaggacagacagagcgcgggcccaggcggaggcggaggcaaggc

SEQ ID NO: 252866 - RNA, 66 nt, Homo sapiens
cccaaccacgggcccaacaaacaaaacagcgggaagggaacaagcccccagccagcagaggcggac

SEQ ID NO: 252867 - RNA, 66 nt, Homo sapiens
gcgggaaacgggagggaaccagcaacaagccgcaaagcaccacaggggaaaacaagcagaaccggg

SEQ ID NO: 252868 - RNA, 76 nt, Homo sapiens
ccccaaaagcgcagaccacagacagaggagaaggcggcccaccccagagcaccggcaacaagggaggcgaggacgg

SEQ ID NO: 252869 - RNA, 59 nt, Homo sapiens
agaggccggcggggcgacagggacggacaacccccgccccacccaccaaggaccaaaag

SEQ ID NO: 252870 - RNA, 38 nt, Homo sapiens
acgagcggaccccaacaagcgggacacgccggaagccg

SEQ ID NO: 252871 - RNA, 68 nt, Homo sapiens
gggcggcaagggaacaaagaagaggagagaacccccgacagccaggaaggaacaagaagaggagacca

SEQ ID NO: 252872 - RNA, 66 nt, Homo sapiens
aagcaggggaccacagaaagcagaagaacgagggccacaccaacaaacagagaaccaaagagccag

SEQ ID NO: 252873 - RNA, 69 nt, Homo sapiens
gaagacccgggagagagaaaaaccggacgagcgagcaaggacacagcaggggccagacaaccagacccg

SEQ ID NO: 252874 - RNA, 75 nt, Homo sapiens
cgggagccacggcgccaccaccaggagaaggcggggaccaaagaccagggcccacaacggaaaaagaagggggca

SEQ ID NO: 252875 - RNA, 75 nt, Homo sapiens
cgagagcggaccgagagcgcgaaacgcacgagaagagagagacacagccgaaagcggacgcaagagcaagaccag

SEQ ID NO: 252876 - RNA, 97 nt, Homo sapiens
cagaaaccagagagccgcaacaaaaccgcccaacaagagccaggccccggggccccagcggcaccagcggagaccacgggagccgcgccggagccag

SEQ ID NO: 252877 - RNA, 114 nt, Homo sapiens
cagccgggacaaaagcagaaaacaaagcaaaacaccagagaaacaccacccacaggacaaagcgaaagggaaaaaacaaaaggagccacaccgggaaaaaaagcaagacgacgg

SEQ ID NO: 252878 - RNA, 81 nt, Homo sapiens
gccgccccaacaccagggaagagacacacccagaagcggacagcgacaccgaaagagaggagccaagaaaaccaacaaaca

SEQ ID NO: 252879 - RNA, 82 nt, Homo sapiens
ccggcagcgcccgcggagacggaagagggaacgacaacccaggaaaacagaggcacacaagccccaggggacccggaggaaa

SEQ ID NO: 252880 - RNA, 73 nt, Homo sapiens
caggagaccaggcaccagcaccacggagcacaagagggagcgggacgggcggcgagcggaccgcgaggccccc

SEQ ID NO: 252881 - RNA, 74 nt, Homo sapiens
gaccggcacccagggggggggaaaaacaagcgaacgacagaaaagagagacaaaaagcaaacgagcaacacgag

SEQ ID NO: 252882 - RNA, 80 nt, Homo sapiens
gaccggcgcaccgcgcaccggggagcccgcaaccgggccacagaccgccaggcccgagccggcaaacgagagcaaaaggg

SEQ ID NO: 252883 - RNA, 38 nt, Homo sapiens
gccgagcagacgcccccggcaggcccagaagcacagaa

SEQ ID NO: 252884 - RNA, 82 nt, Homo sapiens
agaaaaacaacccagaaccaaagaacagaacgcaagcacaggaccagaaacgaaaggcagcagaagaggaaagccagaaaga

SEQ ID NO: 252885 - RNA, 37 nt, Homo sapiens
cgccccagcaaagaaacgagagcggaggagggccaag

SEQ ID NO: 252886 - RNA, 52 nt, Homo sapiens
gccccagggccggagcgcaccaccgagacaagcagagcggcaaaggccccgc

SEQ ID NO: 252887 - RNA, 81 nt, Homo sapiens
gagcgcgaagcgggaccacgcggaggacgggcaacaggagccccacgccacggagagaccgacagagccacaagaaacaaa

SEQ ID NO: 252888 - RNA, 78 nt, Homo sapiens
ccgcagggacgggggaacgggaacacggagaccgacaacgacgcaccgcgcggccgccgacggagcgcgccccaccgc

SEQ ID NO: 252889 - RNA, 82 nt, Homo sapiens
aaaagagcggcacccgaaggacggagcaagcagaggaccaaggagagagggaggaggccgcaaggccccccggaacaccgga

SEQ ID NO: 252890 - RNA, 83 nt, Homo sapiens
ccgccccccggcgccgccgggccgacggagaccagcaggagccaggccaagcagcagaacagaagagacccggccacgaaaga

SEQ ID NO: 252891 - RNA, 53 nt, Homo sapiens
gccagagcggaagccaaaggcaacgaccggaacgagggcggagcaaggagcac

SEQ ID NO: 252892 - RNA, 73 nt, Homo sapiens
gcaggcggagccgaccgggccagaaggagaagcgagccagagcggaggaggggcacaagcgggcaaggggcgg

SEQ ID NO: 252893 - RNA, 63 nt, Homo sapiens
cagcacaccccgcgagcaagggaaagggagcagcaccggccacacccacagcacgaccggaac

SEQ ID NO: 252894 - RNA, 80 nt, Homo sapiens
gcgccccacacgccgggccggcgaagcaggggcacgagcgggccgagggaacagcgacaagcaccaaggaagaagagaca

SEQ ID NO: 252895 - RNA, 74 nt, Homo sapiens
ccggccgaaagaccagcagcacaaaagcgggaccaagaaaggcccagggaccaaagcccggacaaggcccgagc

SEQ ID NO: 252896 - RNA, 81 nt, Homo sapiens
accggacgcccagacaggcgcccagggaccaagaaaggcccagggaccaaagcccggacaaggcccgagcaccaggaccgc

SEQ ID NO: 252897 - RNA, 59 nt, Homo sapiens
gggcagcccgggaaacccaagcagaaaggccggcgcggcacccacaaagcacgggagac

SEQ ID NO: 252898 - RNA, 74 nt, Homo sapiens
gaaggaagcaaagcaccaaagacgagaaagaaacagcaggccaagacaagcgcgcacgcggccacacggccacg

SEQ ID NO: 252899 - RNA, 73 nt, Homo sapiens
acacaacccaagaagcccccaggagaagcaaaagcggacaagcacccccaccaggaaacaaagacaaaagaag

SEQ ID NO: 252900 - RNA, 73 nt, Homo sapiens
aggcaggccagagccgaaccaaagagcagcaggagacagccagagaagcaaaagaaacaaggcaagacggaag

SEQ ID NO: 252901 - RNA, 63 nt, Homo sapiens
aaagaaaacagaagcgggacccaccaggccacacccagcggaaaagaccgccagcaacagacc

SEQ ID NO: 252902 - RNA, 73 nt, Homo sapiens
gaaagcagcagcagaaaacgaaggaagaggagagccaaaagccgaaagccacaagagacccggacagaaaaga

SEQ ID NO: 252903 - RNA, 99 nt, Homo sapiens
gcgggaccccagcgcgggcggcggcggcgggcgggagccccagagcaaaccgggggaacggggcagagaccccagcaccggaagggccccacagcacga

SEQ ID NO: 252904 - RNA, 83 nt, Homo sapiens
gacgcgcacacagcggcgcgcacagggacaccggggcgacgggagaccgaaggaagaaaccggaggcgccagcaacaggaagg

SEQ ID NO: 252905 - RNA, 91 nt, Homo sapiens
ccgccgcgcccaggagggcgggaagaagcgagagccaagcaaaagcagaccggaaaacccaccggcaagaccacacccgaggggagcccag

SEQ ID NO: 252906 - RNA, 65 nt, Homo sapiens
gagccccaccagccccaagagaagagggacaccccaaaacagcgggaagagaggcagagcacgcc

SEQ ID NO: 252907 - RNA, 78 nt, Homo sapiens
gcgcccggaggcccgcaagcccccccggagaaaaaggaagcgacaaacagcgacaaagagcaaagaagcacgaaaaac

SEQ ID NO: 252908 - RNA, 76 nt, Homo sapiens
acggagaccggaaggagagaagagaaaggacgaccaccggaagccccagaccagaccggacgcacgccacacccaa

SEQ ID NO: 252909 - RNA, 68 nt, Homo sapiens
aaaaacccaccgagagcagcacagggcccgaccaaccaccagcgcaccaggacccaagcaaggagcca

SEQ ID NO: 252910 - RNA, 65 nt, Homo sapiens
gccgaagaaaagagagagccaaggaaacgccagcaacccagagggggaaagaccaaccgaaaccg

SEQ ID NO: 252911 - RNA, 46 nt, Homo sapiens
gcaggggaaccggcgagcgcaggaacccaccaaaacggaaaaaggg

SEQ ID NO: 252912 - RNA, 80 nt, Homo sapiens
gcaagggaaaaagccagggaggagccccggcggaagccacagcaggagaaggcagagaaacccaggacgagaaaaaacag

SEQ ID NO: 252913 - RNA, 71 nt, Homo sapiens
gggaaccacccgacacacagccaggcccacgggaaaaggggcggaaaaacaaacgagccaccagcgcccac

SEQ ID NO: 252914 - RNA, 79 nt, Homo sapiens
ccggggcacgagcccggaaaagacgaggacgcgcacaggaaaggacgcggaacaagcaggcagccaggcagcagaaggc

SEQ ID NO: 252915 - RNA, 48 nt, Homo sapiens
acacaggccaggagggggaagagaggggcagacaccccacaggcacca

SEQ ID NO: 252916 - RNA, 73 nt, Homo sapiens
gaccagaaacaacccacgggaaaggaaaggaagacagaaaacagaagcaggaaccagggaaagagacagaaaa

SEQ ID NO: 252917 - RNA, 76 nt, Homo sapiens
ggccgccccgcgggggacgcgacacaccaccggagcaaccacacgggagagcgcggccacagggacaagggcggcc

SEQ ID NO: 252918 - RNA, 55 nt, Homo sapiens
aagacacagcggccagacggcggccgacccggaagaaccacaacacaggcccggg

SEQ ID NO: 252919 - RNA, 71 nt, Homo sapiens
ccagcgcaaggaccacgcaggcccggggggcccacggggcagggaagagcacaagcgccgcgcgccacgac

SEQ ID NO: 252920 - RNA, 73 nt, Homo sapiens
aaagagcagcgaggcgaaagcaaccacagacaacaggcacaaagagagaaggaacacccacagggcagacaga

SEQ ID NO: 252921 - RNA, 78 nt, Homo sapiens
acccaaggagcacaagagcgccccaagcaaggaagcgacagggcgggaagaaacggggagccgccacccaccggaaga

SEQ ID NO: 252922 - RNA, 59 nt, Homo sapiens
aaagcccgggcaaggggacgcgcagcgacgcagaaccggccgaaaagcacaaacagcaa

SEQ ID NO: 252923 - RNA, 76 nt, Homo sapiens
aggacggccccaaacaccgggcaaagcacgaagcaaccccgggggccaaggaaacggaagaccaacccagcaacac

SEQ ID NO: 252924 - RNA, 75 nt, Homo sapiens
gggaggacagagcaaaaaccccaaaaggaggagcccccgggaggaaccggcacaccaccgaacccaccccagcca

SEQ ID NO: 252925 - RNA, 78 nt, Homo sapiens
gaggccccccagccacggaaacaccacagagaagcccacccggaaacaaacgccaggggacccccagaccaccgacag

SEQ ID NO: 252926 - RNA, 78 nt, Homo sapiens
caaaaaccacgagagcccgcccaacaaacagaggacagggccccccaggagccgaggacacagcggggccccacggag

SEQ ID NO: 252927 - RNA, 68 nt, Homo sapiens
caagagagcggccggggaagggagccccagggacaaccccagagacagccgccccgaggccccggcgc

SEQ ID NO: 252928 - RNA, 79 nt, Homo sapiens
cgccgccgcgccgcgccgcgccgcaccccgagcgaccgggagaagcccaccacgcaacgggacggcgcggcggaaggcg

SEQ ID NO: 252929 - RNA, 40 nt, Homo sapiens
cgaagaggccagaaaggggaacaggcagcacacccagagg

SEQ ID NO: 252930 - RNA, 69 nt, Homo sapiens
gcggagcccgggacgcgcgacgcccgcgccccgacccagagagagaggggacaccccccgggaggaagg

SEQ ID NO: 252931 - RNA, 88 nt, Homo sapiens
ggggccagcgcagccgcggcggagacgcacaggcccgaccacacgaaggggcagaagagcacaagacggaagagaggagcgaccagac

SEQ ID NO: 252932 - RNA, 74 nt, Homo sapiens
aaccagcacgggaggaagggagccacgcacaccgagaaaaagcgacagagaaagaagcgaacccggaagagacg

SEQ ID NO: 252933 - RNA, 59 nt, Homo sapiens
gacagacgagagaacgaggcgggagcaaaaaaggagaggcccggggagaagaaagaggg

SEQ ID NO: 252934 - RNA, 74 nt, Homo sapiens
gcccgccacccaggaggaagaaaggaagcacgcgcgcggacaagaccagaaagaaaagaaccaaggagcggaga

SEQ ID NO: 252935 - RNA, 84 nt, Homo sapiens
gagggccgggcgacgccagaacccggagccagaggaccacagaaaggacaccaggccaacgggagcaccgacggagaaaagaag

SEQ ID NO: 252936 - RNA, 72 nt, Homo sapiens
gccccccggacagcgcgaggggccccgggcgagaaaggagcaccagggcaaacaagggcagggagcagcgca

SEQ ID NO: 252937 - RNA, 71 nt, Homo sapiens
aagcgaaagaagcccaaccgcggagaaaaggggacaggccgggaggcccagaaaagaacggccacgagcag

SEQ ID NO: 252938 - RNA, 64 nt, Homo sapiens
cccggccgccggcccccaacagcgccggaagaagagaagaccggacgagagaccgaaccaaaga

SEQ ID NO: 252939 - RNA, 78 nt, Homo sapiens
gacagagggggcacccagaggccggggaccgccaaccccccaagaagcagaggggcccggcgaacagccgaggaagcc

SEQ ID NO: 252940 - RNA, 82 nt, Homo sapiens
gaaaagccaccagggaacgggcacaggggagcgcaagcacggggacccggccaaacccagagccggagcaaacagcccagaa

SEQ ID NO: 252941 - RNA, 73 nt, Homo sapiens
cggcggggaagaccgcggcgaagaggagaaggcgcgcagcagaagaccagaaaccggaggaggcaaggccgga

SEQ ID NO: 252942 - RNA, 61 nt, Homo sapiens
cagagaccaaaggcccaaccaaccaaggccggacccaagccagaagcccgcaaagccccca

SEQ ID NO: 252943 - RNA, 58 nt, Homo sapiens
gcaggaggcgcggacacgcaaaccacacaaggccggacccaagccagaagcccgcaaa

SEQ ID NO: 252944 - RNA, 101 nt, Homo sapiens
aggagagaaaggagacccgacgcaacgcggagcgcaaggcgagggacgagaacgagagaagaacggcacacaccccccagaacccgaagggaaccaaagag

SEQ ID NO: 252945 - RNA, 73 nt, Homo sapiens
gaagggcccggggcaaagcacagacaggagaaagaagacagccacagaaagcccagagaaacagagggcaaag

SEQ ID NO: 252946 - RNA, 87 nt, Homo sapiens
caaagcaccaaagacgagaaagaaacagcaggaagggaaaaggccgaggcacagcgggaagaccgcaaagacgacccgagacaggga

SEQ ID NO: 252947 - RNA, 58 nt, Homo sapiens
ccacggagccacggccacggccgcaagacgagagagaaggaagcgggggggcagagcc

SEQ ID NO: 252948 - RNA, 78 nt, Homo sapiens
accaagccggcagacgcgaaggagaaaaagcaggggaagcagcgcacgccaggggcgggacagaagcggagcccagcg

SEQ ID NO: 252949 - RNA, 60 nt, Homo sapiens
ccacacccaccaacaacaccacaaaaccacagccaagggccagacagccaccgaaggggc

SEQ ID NO: 252950 - RNA, 109 nt, Homo sapiens
ccgcggcaagaagcagcgccacacccgggaacagcgcaggcggcggaggcgcaggcggcgagccggagcaggaagcgcacacgccaaaggagagcgcggagaaccaaac

SEQ ID NO: 252951 - RNA, 74 nt, Homo sapiens
ccgaacaaacaaacacccagaaacaagagcgccccacaaggaaagacgccaaggaagacccagaggagcaagag

SEQ ID NO: 252952 - RNA, 60 nt, Homo sapiens
ccgaaggaacgggagcggcgaagaaaagggagacgaagaggccaaagggaccgaacagcc

SEQ ID NO: 252953 - RNA, 83 nt, Homo sapiens
gacgggcgggcagggccgggcccgcaggcacgaaccccagcccgccgggaagcgccgccaggccccccacccaggggaggccc

SEQ ID NO: 252954 - RNA, 78 nt, Homo sapiens
caagacacgggacgcggaggccagggccaagacaggaaaccaacaagacgagggggagcagaccggaagacccgacgg

SEQ ID NO: 252955 - RNA, 71 nt, Homo sapiens
cccggcgaccaacccgaccggcgggacggcaggggaaagccggggccccggggacccgcggcacggacagg

SEQ ID NO: 252956 - RNA, 73 nt, Homo sapiens
acccgcccgccagaaccgcgcgccacccacaaccagggaaccacggagaccagaccgcgccacaggacaagaa

SEQ ID NO: 252957 - RNA, 82 nt, Homo sapiens
cgggcgggccggcgccggagacgagccgggaaggcgaggagcggaaggcgagcggagcggcggaggaggaaaagaggagcgg

SEQ ID NO: 252958 - RNA, 67 nt, Homo sapiens
aacagggggagaaccaggacagcagaaggagacagcgggaagggcacaaacagcaaaaggaaaacac

SEQ ID NO: 252959 - RNA, 72 nt, Homo sapiens
cacacccagcccgagcaaagcgccgcaaggcacagccagcccgccagggacacacagacgccacagagggac

SEQ ID NO: 252960 - RNA, 80 nt, Homo sapiens
gaagggaccgcgacccgaggaagacagccaagcagagaaacgaaggagcgacaaggagaccggcccccggcagaacggga

SEQ ID NO: 252961 - RNA, 71 nt, Homo sapiens
gaagggacccaaaaagacggacagcccacgggaacaagaggggacagaaagaggccgaagcaacgaagacc

SEQ ID NO: 252962 - RNA, 71 nt, Homo sapiens
aggcgaaacagaaggcggaggcagaacgaaagagggggcagcggcaagcaggggagccagccacacagaga

SEQ ID NO: 252963 - RNA, 76 nt, Homo sapiens
gggaccagggaagggggcagagccaaagacgcggaaggcagaacagcacaggacagccagacagaagggcacaggc

SEQ ID NO: 252964 - RNA, 36 nt, Homo sapiens
ccaacagggaacgcagaagcaacaaaacccaccgca

SEQ ID NO: 252965 - RNA, 70 nt, Homo sapiens
acaagacagcacaaaaagaccgcagagccaagccccgcgggcgggcccaccaggccccacacggcaaccc

SEQ ID NO: 252966 - RNA, 78 nt, Homo sapiens
ccaacccaggaggaaaaacgagcaaagaggcccaggaccggaccccgacggagagagaagacaccacggccaggcggg

SEQ ID NO: 252967 - RNA, 62 nt, Homo sapiens
gggaccaggcgaagcggccgagcaggcgagcgaacgacggacaccaggggggaaaaaccaca

SEQ ID NO: 252968 - RNA, 54 nt, Homo sapiens
ggagagcaagccagggcaacgaggggccggagcgagggagagcaggaacacaga

SEQ ID NO: 252969 - RNA, 78 nt, Homo sapiens
gccgcgccggagggggcgagcagcccggggagagcgcgccaagaccgcgcagccgcggcgaaaacagcaccccagcca

SEQ ID NO: 252970 - RNA, 84 nt, Homo sapiens
agagaaccgaccagaacgcagcaacaaagaagaagaagcgaagccggaaaaaacgaggaaaaagacaggcaggaggaagcacag

SEQ ID NO: 252971 - RNA, 74 nt, Homo sapiens
cgagaagccggacgagcgagccggcaccccagggcagggcccacccgagggagcacgggagaagcgagggacca

SEQ ID NO: 252972 - RNA, 82 nt, Homo sapiens
ggccacagccgcagcagcgccgcccagcggcaccaaagccaagccccgaaggacagacaaccagaggaaaaaacaaaagaaa

SEQ ID NO: 252973 - RNA, 73 nt, Homo sapiens
ccgccgagggcgccgccagagcaggcccgacccggaggcaccacgccgacgcccgccagcaccaccacgccga

SEQ ID NO: 252974 - RNA, 68 nt, Homo sapiens
accaacagccgacagaaaaccagacgagagacagaagacgaaagggcaagaaagagagcacggacaag

SEQ ID NO: 252975 - RNA, 88 nt, Homo sapiens
ccggcaccagacaagcgagggcaccggggagcgaggcagaggccagcggcggggcagccgagggcaggagcaagaaggcgccccccgg

SEQ ID NO: 252976 - RNA, 71 nt, Homo sapiens
gcccaggacacccaggagacccccaagaacagaagacgaccaccagacacccggagacaaagggcgcagcc

SEQ ID NO: 252977 - RNA, 86 nt, Homo sapiens
cggagcgccggccaagcaagccagcggggaccgccagcgaccggaggccaaggcgagaagggaaaaccggagcccagggaccaggg

SEQ ID NO: 252978 - RNA, 69 nt, Homo sapiens
agagcagcaggagcaaaggaagagaaagacagggagcagagagaaagccgaagaaaaaacggagagaga

SEQ ID NO: 252979 - RNA, 48 nt, Homo sapiens
ccggccccacgcggccccgcggacccgcaggcggcagacgcagacaaa

SEQ ID NO: 252980 - RNA, 81 nt, Homo sapiens
cagccggcaccgacggcggaccgacccgagccggacgaaaaacggaaacgccggaccaaaagcaagccagagagaaccaga

SEQ ID NO: 252981 - RNA, 87 nt, Homo sapiens
cggaaggccccagcggggggggaagcggaggcacgggcggcccgcaggaccggaccgggggagacgggaagaccccagaaaaagaaa

SEQ ID NO: 252982 - RNA, 77 nt, Homo sapiens
ggggacacgcgacgaggcccgccaagaggcgccgcaggagggcggagaacggaaaagcaccaggaagcagagaggac

SEQ ID NO: 252983 - RNA, 78 nt, Homo sapiens
aaaggcagagaagcaccccccgcccggaggggagaggacccccacccagagaccccaggaggggacggaaaaagccac

SEQ ID NO: 252984 - RNA, 69 nt, Homo sapiens
ccaagggcaccaaacacccagaacaacaaagagcaacccacagagagagaggaaacgaagggagcgaca

SEQ ID NO: 252985 - RNA, 74 nt, Homo sapiens
cggggagaaaccacccacacccaccaacagaaacagacccaaacacgaggaagcagagaaaggggaaaccaaca

SEQ ID NO: 252986 - RNA, 78 nt, Homo sapiens
gcggcgcacacagagcagagacgagcgaggcggagggagaagcggagcggagcgcccaaacacacacgcgggggcacg

SEQ ID NO: 252987 - RNA, 75 nt, Homo sapiens
acacccaccgagagagaggacacgaaacagagaggggaaggagcccagcgaccgggaaaacaaagaaccgaacaa

SEQ ID NO: 252988 - RNA, 71 nt, Homo sapiens
accccacccacacaggaccaaagggagacacacacgggaggcaggaaccgcagaacgaagccacaaaggga

SEQ ID NO: 252989 - RNA, 82 nt, Homo sapiens
cgggggccccgcacggcaccacaccaaccccggggcacgagggcggggaagaggaccagccgaaagacgaaggaagccagaa

SEQ ID NO: 252990 - RNA, 74 nt, Homo sapiens
ggaaagaagaaaaagaaagggcagccaaagaagacacgcggaagcgagaaaacgaaggaaggaggacccgagga

SEQ ID NO: 252991 - RNA, 70 nt, Homo sapiens
ggagacagaaagagaccggaccagaaaccaggagccacggacaagaccaaaagacgcggggaaacacagg

SEQ ID NO: 252992 - RNA, 81 nt, Homo sapiens
aacagaccgggggaaaaagccgacccccccgcacagagggaagcccggaccaagagacgaggaaaaccccacccacaaagg

SEQ ID NO: 252993 - RNA, 78 nt, Homo sapiens
cacgccacccgccccggagcagcgggacacagaaaaaaaaggccgcagaaccccaaaggacagaggagcgcccgccgg

SEQ ID NO: 252994 - RNA, 112 nt, Homo sapiens
gcagggccacgccaccgcagggaagaacccgagcgaagcgggaagaggcgcagacaagccgcagggaagaggagcggaaaaacaagcaaaagaaaaacagggaaagaggaga

SEQ ID NO: 252995 - RNA, 78 nt, Homo sapiens
gccgcgggcggaagacaggccacccagcggggagcacggcgagcagccaggccaggagaggaaacaagaagagcagac

SEQ ID NO: 252996 - RNA, 48 nt, Homo sapiens
acgccgcgcaccggagccggcacggccggcgaaaggagggccgccccc

SEQ ID NO: 252997 - RNA, 69 nt, Homo sapiens
gacgcgccgccgacaggagaggcgccgagaggaaaacacagcggagcacgacagcaagagagcaagaac

SEQ ID NO: 252998 - RNA, 89 nt, Homo sapiens
gcgcccagcgcgccggcggagaccccaggagcccggagaggaacccccgaagggaccagaacggaggcgcacaagagcagggaccccag

SEQ ID NO: 252999 - RNA, 68 nt, Homo sapiens
aaggaccaagaaccaggaacacgaaacccgaagaaaggggggccagaaggcaagagacaagcaacggg

SEQ ID NO: 253000 - RNA, 80 nt, Homo sapiens
aggacccaggagaaagaagagaggaccagagacacgacaaaagacaggcagaagcccccggggagagacagacagaggga

SEQ ID NO: 253001 - RNA, 83 nt, Homo sapiens
ccgccgcgcggagcgcccccgcgccccgcaccagagcggggcaccgagccgggaccgggcaaagagccagagaccccacagag

SEQ ID NO: 253002 - RNA, 81 nt, Homo sapiens
ccgcgggacgggaaccgcgacacaaggcccgccgccccggggcacgccaggcaaccaagacaacaagccaaagccacaccg

SEQ ID NO: 253003 - RNA, 78 nt, Homo sapiens
gcagcccggagcgcccgcgccagccgcgcacaacggggcaccgagccggcgaacaagaggcgccagcgggcgcgccgg

SEQ ID NO: 253004 - RNA, 87 nt, Homo sapiens
caacaaccaccgcggacagcagcagcaacagaagaggagcacggcggcggaggaagaaagaccgacacagagaacaggaggaacgag

SEQ ID NO: 253005 - RNA, 76 nt, Homo sapiens
agggaggacacgaaggaacaagacagcggaacagacagagcggcagaggacacgccacccaggcagaagagagcga

SEQ ID NO: 253006 - RNA, 72 nt, Homo sapiens
gacacccgaacgggggacaaggaggacccccagcaacccagaagccagacgggagggcaaggccgaaccgca

SEQ ID NO: 253007 - RNA, 80 nt, Homo sapiens
gcgaacagaaaagagaaaaagagcgaaaaagaccagcgcgagacagagagacacggaaaagggggcgaaccaacgccagc

SEQ ID NO: 253008 - RNA, 53 nt, Homo sapiens
gccccggcgggcagagaccagcaccggagaagggggaaaccacaccacccgcc

SEQ ID NO: 253009 - RNA, 71 nt, Homo sapiens
acggagaggacgaaaggcccgaacgaagagcacagcgaccagaacccacacccagcccagccgccacgcgc

SEQ ID NO: 253010 - RNA, 74 nt, Homo sapiens
ggagggcaagacagcgagggacgaaggagaccgcgcagacacacgccaagcaacaccacagagacccaagagaa

SEQ ID NO: 253011 - RNA, 116 nt, Homo sapiens
agagccagggccccggcgccaggcacagaaccgcccgccacccgagacaggacaacgccgggacgcaaggggggccaccacagcaacaggcacagaaaggcggccgaagggaacgg

SEQ ID NO: 253012 - RNA, 77 nt, Homo sapiens
gaaggcagggacacacagcaggagaaacccgcaagcaccaccacgagaaaccaaagagccaggcgacccccgcgccc

SEQ ID NO: 253013 - RNA, 76 nt, Homo sapiens
gcggggaagagcagcgagagcgcggagcgggcggagcggcgagagcccccacggacagaagcgaaggggacagggg

SEQ ID NO: 253014 - RNA, 64 nt, Homo sapiens
gcgcacgaggcggcacaagcgcaaaaaccagacaccccacaccaccacccagacgaccaaaagg

SEQ ID NO: 253015 - RNA, 52 nt, Homo sapiens
gacccaggccaagaggccaaccagaccacaggaagaggcacggaggccggag

SEQ ID NO: 253016 - RNA, 75 nt, Homo sapiens
ccaacagcaagagagggcgagcccagaacgcagggccccacaagcgagggcagaaagggcccagccggcagaggg

SEQ ID NO: 253017 - RNA, 76 nt, Homo sapiens
gcgccccgccccgaggggggcgaagaagcagccggggaagaaaacgccagagaagcagagcagcccggagcgaggg

SEQ ID NO: 253018 - RNA, 99 nt, Homo sapiens
aagacggcgggccagccgggaggggagagccccgcaccccccccagaaacaggaacaacagagagaggaccagacaagggaaaaacccggaagcaacgg

SEQ ID NO: 253019 - RNA, 75 nt, Homo sapiens
gccgccacccgaggaagacgaggacaggacagagcccccgaggccccagaacaccgggggagagccagcaaccgg

SEQ ID NO: 253020 - RNA, 34 nt, Homo sapiens
gggggcaggagccagccacggaacgcgaagagac

SEQ ID NO: 253021 - RNA, 74 nt, Homo sapiens
agggggaccacacagccagaacagcggacgccacacccaagagaagcccgaaaaagcgcggagcgacaaccagg

SEQ ID NO: 253022 - RNA, 81 nt, Homo sapiens
aggaaaacggccaacccaccgcgccgaaagaagaaaggaagaaagagggccacggacagaggcgcagcagaggaaccgcag

SEQ ID NO: 253023 - RNA, 82 nt, Homo sapiens
gaagaaacagagacaaaccgacagaagagcggaaacacaggacagagagaaagaagcgggaggagagcagaagccgaggaaa

SEQ ID NO: 253024 - RNA, 76 nt, Homo sapiens
cagacaagagcaccacgggcaggaaggcagcgcacgacagcaaaaggccccccaggccacccaggaccagcggcac

SEQ ID NO: 253025 - RNA, 83 nt, Homo sapiens
ccccggcccccccacccgcgggccgcggcgcccggggaaagccgggccccgagggcggaccgagagcgcagaaacggagggca

SEQ ID NO: 253026 - RNA, 105 nt, Homo sapiens
ggaagaagacggccgcgaagagcacaagaagaaagccgaagcggcgcgcaagcccagcccgcagggaccaggaggaagaagagagccgagggaagacagaggagc

SEQ ID NO: 253027 - RNA, 84 nt, Homo sapiens
cgagccagggccgagaggggcgccgcaaagaaggccaagccgccagccacaaggaccacccgagcaggaagacaccagaaaagc

SEQ ID NO: 253028 - RNA, 32 nt, Homo sapiens
gccggaagagaaggacccggcgggggcaagga

SEQ ID NO: 253029 - RNA, 97 nt, Homo sapiens
gaagagaacggaacaagcacagcaggagaagccggaaagaacaagagccagcgcagaagacgagaagccaggaggagaagcggcccggcaagaacga

SEQ ID NO: 253030 - RNA, 60 nt, Homo sapiens
ggcaccccgacaacccagaaacaggacaaaagccacgaggcacaaagaggagacagccaa

SEQ ID NO: 253031 - RNA, 78 nt, Homo sapiens
aacggccagagcacgcagcgagcgagaagaggaggacaacagcacaaccggggcacaggaaccgacaagagaggggaa

SEQ ID NO: 253032 - RNA, 73 nt, Homo sapiens
caccccacgcgcaccagagagcggagaagcccaagcccaccccaaaggcaggggcaggcccggacccaggggc

SEQ ID NO: 253033 - RNA, 77 nt, Homo sapiens
gggcggaaccccccagcccaccggagaagccaccagcgcggagccgagagcgagacggaacggggggccacgacggg

SEQ ID NO: 253034 - RNA, 49 nt, Homo sapiens
gacaccgcaaggcacagaacagcggaacgcagggcgcaccaccagagac

SEQ ID NO: 253035 - RNA, 112 nt, Homo sapiens
ggagagacaacgacccggggaccgaaccccggcgaacagcaaggcacaagacagagcggcagacacgcagcaaggcagagcccccagacagagcagccacaacagccaacac

SEQ ID NO: 253036 - RNA, 83 nt, Homo sapiens
aggcacagcaagacccacacgccgcgagccgacgcagaccaccaaaacagccgccagagcccagcagaaggaacgcggaaccg

SEQ ID NO: 253037 - RNA, 77 nt, Homo sapiens
gagagaccaggacacagagaacagagagacacggcgcggaaagagggaacagccgggacccaaacagcacaacgcac

SEQ ID NO: 253038 - RNA, 88 nt, Homo sapiens
ccagagccgggggcggcgccagggccagacaacagaagacacccaggagcagagcaaacaagcaaccagagacagccgccgaagagcc

SEQ ID NO: 253039 - RNA, 61 nt, Homo sapiens
gcggaccccgcccaggccgggagcgcacaagaggagcaccgccccaggcggagacaaggca

SEQ ID NO: 253040 - RNA, 76 nt, Homo sapiens
aagaacgggcgagagccgaccaacaggagaaccgaaagcaggggagcagacaaggggcccaagcagagcagcagac

SEQ ID NO: 253041 - RNA, 61 nt, Homo sapiens
ggaagggacggggggcggccacggcaggcgaagaaagggaggcaccaggcacggggaggcc

SEQ ID NO: 253042 - RNA, 75 nt, Homo sapiens
cgccaccaggcacgcacgagaccggcaggacaacacagaggacccagccacaccacaaggccagagacgacggaa

SEQ ID NO: 253043 - RNA, 73 nt, Homo sapiens
caaaagcggaagagcccacgagaagcccgccaacggggaaagcagaccaacacgccaaggaaaaccggagaaa

SEQ ID NO: 253044 - RNA, 72 nt, Homo sapiens
gggaaacggcacaccaggcggcaggggcaaccagacgggccaaggcccacacgggaagagaccagccacaga

SEQ ID NO: 253045 - RNA, 71 nt, Homo sapiens
cgaaccaagaccaaacgcacgccccaagacaaaaaacgaccccagaagcagagcgccccgcaagagaaggg

SEQ ID NO: 253046 - RNA, 69 nt, Homo sapiens
gaaccaaggaagcaggccagaggacacaaaaggaagaaccaaagcccgcaagcaaagcgaggaaacagg

SEQ ID NO: 253047 - RNA, 73 nt, Homo sapiens
ccccggccgcggagcgacgccgacgggccccacacagggaaaacgaaaaaccccaagagaacgcacgggcaag

SEQ ID NO: 253048 - RNA, 72 nt, Homo sapiens
ccaggagcgccacgcgcggaaggcagcgcccagcagcgcagaacaggaggccccacaaggccgcaccaggaa

SEQ ID NO: 253049 - RNA, 74 nt, Homo sapiens
aaagaaccaagaaaaccgaagaccaccagagagaagaagcgagagaaaaggaacggaagaaaaaccgacacccc

SEQ ID NO: 253050 - RNA, 61 nt, Homo sapiens
cggccgggcggaccaggaagccgggggagccgccaccaaaagcagacggaaaacccacggg

SEQ ID NO: 253051 - RNA, 42 nt, Homo sapiens
gggcccccgcggcggccagaagaaacgaggagcagcaacaga

SEQ ID NO: 253052 - RNA, 76 nt, Homo sapiens
gagaacagggcagaacgaggggaggaaagcagccacaggggaaaagaaacggcaaaaagaagcgccggccgaggag

SEQ ID NO: 253053 - RNA, 73 nt, Homo sapiens
caggaccgccaaacccaaaccgacaacaaacaggaggccgagggaaaggggacgggcaccaaacggacagacg

SEQ ID NO: 253054 - RNA, 84 nt, Homo sapiens
gggcaagggaccagcaaggcggcagagcaaggggcacgcagaaggaccggccacggccgcaggagggaagcgcacggaaaccgc

SEQ ID NO: 253055 - RNA, 54 nt, Homo sapiens
gggaaggggcgaacgcagacggggaaggcaagaccacagcagacacagagacgg

SEQ ID NO: 253056 - RNA, 73 nt, Homo sapiens
aaagacggcgccgacaaccaagaagccagagaaacggaccaaaaaccaccaaccaggacccaagaggagcaca

SEQ ID NO: 253057 - RNA, 79 nt, Homo sapiens
aacaaaccgaagaacagcgggaaagaaggcaaaacacgggcaagaacggaagcacgggcggaggaaagcacaagcagag

SEQ ID NO: 253058 - RNA, 67 nt, Homo sapiens
ggccagacggagagcgacaccaaagacgggcagaagcgggacccccaaaagacaagggcaaaacgga

SEQ ID NO: 253059 - RNA, 68 nt, Homo sapiens
accaccccggacagacagaggacagaaagcgggacacaagcaggagcacagaccccgaaaagggagac

SEQ ID NO: 253060 - RNA, 68 nt, Homo sapiens
gcagccagaccaagaacaaccgcggacacggagaggaagggcccccccaaggagggaaggcaacgcca

SEQ ID NO: 253061 - RNA, 76 nt, Homo sapiens
agggagcagagaaacagacacgaagggacccgaggccacacccgcagcccccccccacacccccagcagcaaagag

SEQ ID NO: 253062 - RNA, 84 nt, Homo sapiens
aggcgggacacacagcagggaccacccccagcacccccgaacaaaaccagccaagcagaggagaaaaagacagcaccccagagc

SEQ ID NO: 253063 - RNA, 76 nt, Homo sapiens
agacccggccgcggagagccggagaagcggaggcacccaaccgcgggacggggcacaaccccgcgcccggcgaagg

SEQ ID NO: 253064 - RNA, 77 nt, Homo sapiens
cgcagggcggagaaaagccagagcacgccggccaaccacggaaaagggccgaccaccagagcacacaccaggcaccc

SEQ ID NO: 253065 - RNA, 66 nt, Homo sapiens
ggccgggcaacacgcagccgagcggagaaagacagcaaagaaaaggagaagaaaggaaaaaaacaa

SEQ ID NO: 253066 - RNA, 64 nt, Homo sapiens
agaccgcgcagaagacacgcccggaagaccagccaacaggcagcccgccgaaggcgccgccaag

SEQ ID NO: 253067 - RNA, 78 nt, Homo sapiens
gggagaaggggaccggcaagcacaagacacacaaggacgaccaggccaagcaagaaggggacccaagggagagaggga

SEQ ID NO: 253068 - RNA, 34 nt, Homo sapiens
gagaggaacaaggcacgacgccccacgggagcaa

SEQ ID NO: 253069 - RNA, 77 nt, Homo sapiens
cagaaccagcacccggcgagaagcgccggcccaggcggaggcaggggccacagccaacccgaccccggacaaggacc

SEQ ID NO: 253070 - RNA, 68 nt, Homo sapiens
cggggccggggaacacacagagcacagacaaacgaaggacagagagaacaccgaaagagccaacccga

SEQ ID NO: 253071 - RNA, 75 nt, Homo sapiens
ggaccaagcaaggacccaccaggccgaagccagccggagcagcggcacaggaggcgaagcagccccgacaaagaa

SEQ ID NO: 253072 - RNA, 81 nt, Homo sapiens
gaggagagaaacaggaacgaggggcgcacaccacaggcccagggcccccccaagccgcaccagcccgaaccccaaggacaa

SEQ ID NO: 253073 - RNA, 71 nt, Homo sapiens
caccacaggcgagccccgaaccagggcagcggagcagaaaaggaaacgaggcgcagaaaaggaagcacgaa

SEQ ID NO: 253074 - RNA, 82 nt, Homo sapiens
agagcgcccgaggaacacaacaagccagaaaaggaagccgcccaacgacccagcagcgcagcccagcccagacacgcagaga

SEQ ID NO: 253075 - RNA, 81 nt, Homo sapiens
cagcaagggccagaagaccgggaggaccagggaagcaggaaaagagagagagagcgccccaaaagaaacaaagccaaccag

SEQ ID NO: 253076 - RNA, 90 nt, Homo sapiens
ggcacacgcgcagccccggccccggcccgccggagaaacagggaaagcccacagcgaagccaagcaaaaggagaagcggcaggcagcccc

SEQ ID NO: 253077 - RNA, 78 nt, Homo sapiens
ggacacgcggcggcgcgggggccggccgcgcggacgaaggagacgaagagggacggacagaccacgggggacagcggg

SEQ ID NO: 253078 - RNA, 58 nt, Homo sapiens
ggaacccgaagaagaaaggacgacagccagagagcacggaacaagagacccaggcacg

SEQ ID NO: 253079 - RNA, 81 nt, Homo sapiens
ggcgggcggagacaggaccgcggcgagcaagcacaaggccaacagcccccccacgggcccccaacccccacgaacacaaca

SEQ ID NO: 253080 - RNA, 69 nt, Homo sapiens
aaaaaccaaaaaaccaagaacggagaacgaaaaacccaccagcagaacaggacaggcccagacggacag

SEQ ID NO: 253081 - RNA, 72 nt, Homo sapiens
cacgcgacacgggggcacaagggcaagcggccacgagccggaggagcgaccggacggcagaacagacagaca

SEQ ID NO: 253082 - RNA, 57 nt, Homo sapiens
gagcccaacccgcaccagccccggcacgcaacagggcggagaacggaaggagaggga

SEQ ID NO: 253083 - RNA, 81 nt, Homo sapiens
gcgaacacagggaggggcagcagggccagcaggaaccagcagaggaccggccccaagcccacaagccccaaagaacagacg

SEQ ID NO: 253084 - RNA, 77 nt, Homo sapiens
agccggggagagacacaccgcagacgcgagaccgcacaagcggagaagagaggcgaaggggggcaggccccccagga

SEQ ID NO: 253085 - RNA, 75 nt, Homo sapiens
gaagcaagagcgcaccgcggccagcgaggggcccccccaccccaacgacagagagaaacaagcggaacgagaagg

SEQ ID NO: 253086 - RNA, 80 nt, Homo sapiens
aggagagaggaacccgaagaagaaaggacgacagccagagagggcaaacgccagccagcgggaggaggcggagccgcagc

SEQ ID NO: 253087 - RNA, 38 nt, Homo sapiens
ccggagccccccaggaggggaccgggaaaggggaaagg

SEQ ID NO: 253088 - RNA, 72 nt, Homo sapiens
gcaacccaaccggcacacaaccccgcccccaggggaggagaagaggggaggaaccaaggaaggccaacagag

SEQ ID NO: 253089 - RNA, 75 nt, Homo sapiens
aaaccgagccagacaacaggacggcgggacagacgaccgggcggcaaaaagaggaaggcacagggaagaagcaag

SEQ ID NO: 253090 - RNA, 71 nt, Homo sapiens
gcaggagaagaccaacacaggccaagaccaagaccccaggagagggaacccccgccaacccagcacggcca

SEQ ID NO: 253091 - RNA, 80 nt, Homo sapiens
ggaccagcgccgcaagacaaaggagcggaccgagaggcagaagcgaggaagagcacgaacgcagagcagagagagaagaa

SEQ ID NO: 253092 - RNA, 79 nt, Homo sapiens
aagagccaggcgggcgcggcggcgagaaggcggacccagacagcgaccccagagaaggacgggccaacgcacggcccgg

SEQ ID NO: 253093 - RNA, 77 nt, Homo sapiens
aggaggaagaacccaagccaaagcccagggcggagaacggaaaagcaccaggaagcagagaggaccgcagaagggaa

SEQ ID NO: 253094 - RNA, 74 nt, Homo sapiens
cgcccggacacagaagaggacagggcgaaaacacagaaacaccaaagaaaagacaaagaacacaagaggggacc

SEQ ID NO: 253095 - RNA, 80 nt, Homo sapiens
gacacaacacaaagaaccaccaaagggcaagggagcagagcccagaacaggccaccggggccaagcaaagccaagcgcag

SEQ ID NO: 253096 - RNA, 63 nt, Homo sapiens
cgaaagcccaggccaaaaagagggcgcacaaaagagcacaaaagcaccaaggcgcacaacagc

SEQ ID NO: 253097 - RNA, 39 nt, Homo sapiens
ggacgacacgagggacacgacgccacagcaacaagcagg

SEQ ID NO: 253098 - RNA, 75 nt, Homo sapiens
ccacagcccgggccaggccagcggcgcagggcgggggcggggcccagccagcgaggggggccggggcaaagaccg

SEQ ID NO: 253099 - RNA, 73 nt, Homo sapiens
acagaacggggcagcgggaaaaggcaaggcacaacgccacgaggcacaccccagcaaggaaggccgcggaccc

SEQ ID NO: 253100 - RNA, 70 nt, Homo sapiens
caaacagagcagcagcagcagagagaaacagcagaccacggaaagaaagacaacaagacacacgacacag

SEQ ID NO: 253101 - RNA, 53 nt, Homo sapiens
ccgacgggcagcacacccaccgagccgagaggggagccagagaccaagagccc

SEQ ID NO: 253102 - RNA, 61 nt, Homo sapiens
gaagaaggggcccacagcacacaaggccaaaacagaagaggcaaagcccagccacagcagc

SEQ ID NO: 253103 - RNA, 65 nt, Homo sapiens
gccgcaggaggcagcagccccgaagagaaacacacggacaacaaacggcggaggcagggcgcgac

SEQ ID NO: 253104 - RNA, 68 nt, Homo sapiens
aaaagagccaggaagggccgcccaaaaaagagcaggaaacgaaggccgggcccaccagcggcgccacc

SEQ ID NO: 253105 - RNA, 62 nt, Homo sapiens
aagacagagcccacccgagaagcgggagaaggagcaccgagacgacgcaaggacacaggaaa

SEQ ID NO: 253106 - RNA, 36 nt, Homo sapiens
accaaacggagaaccagcccagccacaggcaacgaa

SEQ ID NO: 253107 - RNA, 75 nt, Homo sapiens
accccggagcccagaagacagagggcgagaaagaccagggacacagagagccacggcccaccaacgggacagccc

SEQ ID NO: 253108 - RNA, 78 nt, Homo sapiens
gaggacacacccaggaaaagaccaggacggacaagcacagccggaagcccgagcaagacagaggcgcgagcggcgaaa

SEQ ID NO: 253109 - RNA, 73 nt, Homo sapiens
gacggaaccccacgacccacgcccaagccgggcaggggagcacacggccggcacggggggagggccgcaggac

SEQ ID NO: 253110 - RNA, 71 nt, Homo sapiens
gcgccggaacccaccagagcgccagagaacccaccaccccgaggccacacgccaacgaggacgacaagcga

SEQ ID NO: 253111 - RNA, 74 nt, Homo sapiens
acgaccggcgcgccccgcccggaccgcgcagaaccagggcggcggccagcgccacgcgggacaaagcaaaaaac

SEQ ID NO: 253112 - RNA, 73 nt, Homo sapiens
cccagccaccgcagccccgccggggccaggcagggagggaagcggagagacaggaaccaggggggaccaaaac

SEQ ID NO: 253113 - RNA, 110 nt, Homo sapiens
agcccggaggaaagacaaaccgacgacacagggcccgcaccccccgcaggggccgagcggcggagaaaccaccacaaacacgaggccagcaacgaccaacaagacagacc

SEQ ID NO: 253114 - RNA, 65 nt, Homo sapiens
aaaggacgagaacgccgcgacagaaaaaaggaagcggaagagaagaccggcaacaagaaaaaaag

SEQ ID NO: 253115 - RNA, 79 nt, Homo sapiens
agacaccagcccaccgagggacccgcagccagcggaagggccccgcaccaccccagcaaccaaacaccacccggacccg

SEQ ID NO: 253116 - RNA, 66 nt, Homo sapiens
gcgccagaaggaagaggcggacggaggagcaggcgagaagagaaggaccgaaggagaagaaggaga

SEQ ID NO: 253117 - RNA, 77 nt, Homo sapiens
ggaaacaaggcaacagaaagagcaacagcagggcaacagaccggggaaccagcaccccagaaggaggagagccagag

SEQ ID NO: 253118 - RNA, 80 nt, Homo sapiens
cccaagaagggcgcggcacggggacgacgcggccgggcccggcaccgccgcggacggccgggaagaagaaggcaagaagg

SEQ ID NO: 253119 - RNA, 70 nt, Homo sapiens
cacagcaacagacagaaacaccagacagcgacaggcgagccccaacagaccgggaggaacggggggcggg

SEQ ID NO: 253120 - RNA, 82 nt, Homo sapiens
gcccggagcccccagcgcagcggccgcggagcggcagcccacaagcaggaagaccagccccaggagggaaacagagcaccca

SEQ ID NO: 253121 - RNA, 76 nt, Homo sapiens
gcccgagggaaaagacaggcaacaggaaagcaagggaaggcgccccaacaaaggaacacgagcgaagggaagggag

SEQ ID NO: 253122 - RNA, 63 nt, Homo sapiens
cggacgacacaacaaaagacagaagaaagggagcccccaagaacagcgagcacaggaaggaaa

SEQ ID NO: 253123 - RNA, 132 nt, Homo sapiens
gaacaacccagggcacgcccgaccgaacagcaccaaacaggaggcggccaaggcccaaacgcacgcacaacaggggccacacagagaacaaaccaggagagaaacaaaccggagaacacgaccaagaggcag

SEQ ID NO: 253124 - RNA, 56 nt, Homo sapiens
cagcaaagagggaacagcaacagccaaccagaaaaccagaaacaccggcagggagc

SEQ ID NO: 253125 - RNA, 83 nt, Homo sapiens
aaaagcgccgcagacagaagggggagaagcggagcaagaggagccaggagcacggggggaacaagaccgccgggacggaagac

SEQ ID NO: 253126 - RNA, 89 nt, Homo sapiens
gaaccgccggcagccggcgacgaggacgagagaaagaaggggcaagaggaagaagcagaagcagagagaggagcgaagaagaagaagcg

SEQ ID NO: 253127 - RNA, 79 nt, Homo sapiens
cgagcaccaaaggggaaagccgaagaaaccaggggaggccagcaagcgcacccagccacacccgacaccagccagccca

SEQ ID NO: 253128 - RNA, 72 nt, Homo sapiens
cgacaaagagggggcccaagaagccgggccgcccgcggcagagcagcagagcgccgcccacaagagacaaag

SEQ ID NO: 253129 - RNA, 84 nt, Homo sapiens
caaggagccacaaggacgggaagcaccaaagcgcgccaagaccccagcagagaccagagaagccccccaccagccccaacagca

SEQ ID NO: 253130 - RNA, 87 nt, Homo sapiens
acggagccgacccggccgagcaagcggccgcgcacgaggaggcggcggccgacggggcggcgggagcaggcggaggcaaggcacgac

SEQ ID NO: 253131 - RNA, 63 nt, Homo sapiens
cagcacgcgcgggccagccaccgggccggccaggaggaagcgggagaggccacccgcccacga

SEQ ID NO: 253132 - RNA, 71 nt, Homo sapiens
gcggaggaggggagcagcgcgcaagaaaagacaagcggagaaaggaccgagggcagcagacgaagaagcca

SEQ ID NO: 253133 - RNA, 80 nt, Homo sapiens
agacgccagaagccaagaacacggagcaacacgcagaggacagccgagaagcgaaacacgacgaacaacggaagaagccc

SEQ ID NO: 253134 - RNA, 56 nt, Homo sapiens
gaaaacaacgacaacgagcacaggccccccaccaggcgcccaccccaccaaccaac

SEQ ID NO: 253135 - RNA, 88 nt, Homo sapiens
gaagaccgagcccccgaaccgcaaagccccagaggacaaccaccccaggacaggagcagagaggggcacacgagaggagcacaagggc

SEQ ID NO: 253136 - RNA, 83 nt, Homo sapiens
gccgccgccgcgccgagcggaggaggaggaggaggcgaggaggagagacgcgccacaggagccgcagaagcaaaggcaccgcc

SEQ ID NO: 253137 - RNA, 77 nt, Homo sapiens
agccaagccgagccgccacccggcgcgggccgccaccaccaggccaggggagcgcgaagcccaggcacagacaggag

SEQ ID NO: 253138 - RNA, 75 nt, Homo sapiens
cagaccaaacggcaaggcagccccccggccccccacccccaggccaccccggagccccccaccgggaacccccag

SEQ ID NO: 253139 - RNA, 58 nt, Homo sapiens
ggcggggagcgacgccagcgcccaacaggaaccgcggcgccaagggaaaaaaacaaac

SEQ ID NO: 253140 - RNA, 72 nt, Homo sapiens
accaccacaaaaagcggcacagggcgggaacagcccgagccagaaggagaaacaaaagggccgcaggaaaca

SEQ ID NO: 253141 - RNA, 98 nt, Homo sapiens
gaggccgcggcggccaggccccagacacagacgagcaggggaagacagacgccacgccgccccggccagccccaggaccgagcagcggccgccgagcc

SEQ ID NO: 253142 - RNA, 122 nt, Homo sapiens
cccagcgccaccaccacgccagccgcaccagccgcccaagccgcacagccgcggcggcagcagcaggagagggcgggacgaccccacaacccgagcgcccaagccccccgcgcagagggaga

SEQ ID NO: 253143 - RNA, 75 nt, Homo sapiens
gcggggccgccgcccccagcgcgcaacccaggaacccgggggacagagaagcagaaccagaaaacccggacaacc

SEQ ID NO: 253144 - RNA, 66 nt, Homo sapiens
acacccgcacccccgcggggaccggacagcggacccggccgcgggacacacagcaacgaagcaggg

SEQ ID NO: 253145 - RNA, 71 nt, Homo sapiens
agggacaggacaggaccaggggcacaccggcagcaccacaaaccgacacgcgggcccagaccaggaggcga

SEQ ID NO: 253146 - RNA, 80 nt, Homo sapiens
cccagaagaggagagagagcaagagaggaagaagaacgacccgcccggggcagcaggcaagaagagacgacaggagagga

SEQ ID NO: 253147 - RNA, 109 nt, Homo sapiens
aaaccagccccaaaaaaccacgaaggaaaaaggggcgagagagagaccagcgggacgagaagaagccaccgggcaccggccgagggcggagcagcgcaggagcaaacca

SEQ ID NO: 253148 - RNA, 84 nt, Homo sapiens
accgaagaagccgcgacaagggaaggagacgcaccaggagcccgggggaggacgcgagcggaagagaagcaaaaagacaaggag

SEQ ID NO: 253149 - RNA, 78 nt, Homo sapiens
agcgaagccaccccggcaaaggagcgagccggagcgccagcccaccggacacgagacgggagcgaaaacgccacaaca

SEQ ID NO: 253150 - RNA, 77 nt, Homo sapiens
aacagcgcgcaacccccccgcccaacaggggagcccccagaaccaggccgagcccgcgcggagacacgccacaacac

SEQ ID NO: 253151 - RNA, 77 nt, Homo sapiens
aaaacagagcccgcgcagcagaagacggagacaagagccacagacaaacgaaaaaggagcaaccgaggaggcaccgc

SEQ ID NO: 253152 - RNA, 86 nt, Homo sapiens
cgcggcacacgggacgaaccccgccccagcggccgcgacggggaggaggcgcgggccgaggagaaagacgcgccagcaggcaacaa

SEQ ID NO: 253153 - RNA, 41 nt, Homo sapiens
gccacaccagaaagagaagaggcggacacaaccaggcagcc

SEQ ID NO: 253154 - RNA, 78 nt, Homo sapiens
agccccgaggagagaccgcaccaacggcaaacacgcagcggccgaggcaggggaagagagcggccccggacacgcgag

SEQ ID NO: 253155 - RNA, 82 nt, Homo sapiens
gaacagcgagcagccgcagagagcagggaggccgggaagcacagagccggacgccaaacaggaagaaggcgcaaaaaaaacc

SEQ ID NO: 253156 - RNA, 74 nt, Homo sapiens
aaggcaaaacgaagacgaggcaaagcacccagcccaccccggcacacggaagacaaagggcaaagaggggaccg

SEQ ID NO: 253157 - RNA, 81 nt, Homo sapiens
ccaagaagacagcagaaaaaagggagcccgcaggggggagaagacagacccccagaggcccgcgggcaccaggaccaacgg

SEQ ID NO: 253158 - RNA, 58 nt, Homo sapiens
gcagaaagggcagacacaggcacaccaagggggaccagccaacgcaggcggagcacac

SEQ ID NO: 253159 - RNA, 84 nt, Homo sapiens
cggaggcggagcggcgccgagaacagagccacgaggagggagaaccgaggagcagccacaagggacgagggcagcagacaacac

SEQ ID NO: 253160 - RNA, 78 nt, Homo sapiens
acaagcccccaacgcacaaacggaaagcaacagaaggagaccggagccgccccgccagaaagccaggggcaccaccac

SEQ ID NO: 253161 - RNA, 52 nt, Homo sapiens
cgcagggcgcccccggagaccagagacagacgaggaagacaccaagaaggca

SEQ ID NO: 253162 - RNA, 81 nt, Homo sapiens
caccgcccaaaaaggcgaggagagagaagcccagaaacagcggagaagcaaacgagaagcacaaaaaacgacagcagccca

SEQ ID NO: 253163 - RNA, 59 nt, Homo sapiens
ggaggggaacacaaaaaggcaccacaaaggcacagcacgaggaacccccggccaaagaa

SEQ ID NO: 253164 - RNA, 65 nt, Homo sapiens
gcaacaaggaaggaaacggaccccaccaccaggcagagaagcggcaccaggaggcccagcccaac

SEQ ID NO: 253165 - RNA, 79 nt, Homo sapiens
agagaaggagcggagcgggccaggaacaccccaccagaccacccagcaagcccacaaaaaaggcacaagcagggacagc

SEQ ID NO: 253166 - RNA, 74 nt, Homo sapiens
agggccaaccgcagaggccgacgggaagacgaggagcgccaggaaagaggcagagacgaagcagaagcgaggca

SEQ ID NO: 253167 - RNA, 65 nt, Homo sapiens
ccaggccccacagagacaggaaggcacaacgaccggaagaaacaggagaaagaagaaacaaagag

SEQ ID NO: 253168 - RNA, 35 nt, Homo sapiens
gaggagagacaaagaaaggccaagcccaacagggg

SEQ ID NO: 253169 - RNA, 74 nt, Homo sapiens
acaagagggccacgcagaagggcaggagcagggccggaggccaagcccgcagacaggacacaaaggaaaaggaa

SEQ ID NO: 253170 - RNA, 68 nt, Homo sapiens
gagagcccagcaacggacccaacagagcacgcaaaggcacaagagcaggacccaggcccagcaagacc

SEQ ID NO: 253171 - RNA, 81 nt, Homo sapiens
ggggagaagaccgggcagccccagcagggaccggacagagcggacgagaaccaccaccgaccaggcaccggagaccagagc

SEQ ID NO: 253172 - RNA, 43 nt, Homo sapiens
aagaccgacaggaggccccggaagacgggcgggcgcggacggc

SEQ ID NO: 253173 - RNA, 74 nt, Homo sapiens
gccgcgcccgggagagcaagggggagcgggccggagagaagagaggggcgcgaggagaaggaaacaggcccgga

SEQ ID NO: 253174 - RNA, 87 nt, Homo sapiens
acggcggacgcagcggcgggggcgaaacaaacagaagcgcacgagaacccaggccgcaaggaacgaaacccaacagagcgccagacc

SEQ ID NO: 253175 - RNA, 82 nt, Homo sapiens
caaaggcaacagaagaaggccaccaagacaaagagagacaccagagccagcagcccgccagaagaggcgagccacacacgag

SEQ ID NO: 253176 - RNA, 65 nt, Homo sapiens
agggggcacgcggaaacgggaaccggccgaaccagaccggagcaggggcagcgaaccagggccag

SEQ ID NO: 253177 - RNA, 49 nt, Homo sapiens
agggacgagcgaaaccagacaacgaagagaggaaagaagcggaaaggag

SEQ ID NO: 253178 - RNA, 72 nt, Homo sapiens
ggaggggccaggaagggacccacgagaagacgcagaggcaaaaaccacaacaagaacggcagaaggggaaaa

SEQ ID NO: 253179 - RNA, 87 nt, Homo sapiens
aaggaagcagagcgccaggcaagcgcagccgagaaggccaagacccgcaacacacagcccgaccccccggccccgaggccacggggc

SEQ ID NO: 253180 - RNA, 73 nt, Homo sapiens
gcccagcggcccgccaggcccgaaaccacaccgccaagagcacaaaaaaaaccagcaacaacggaggcaaaca

SEQ ID NO: 253181 - RNA, 70 nt, Homo sapiens
agaggggaaggaacgaggaagaaaacgccaaggcggacgggcagccggggcagaccccccccacggcacc

SEQ ID NO: 253182 - RNA, 74 nt, Homo sapiens
gcgaccaggagcgccccgaagcgggcagcgccaacgcaaacacagcagggggacacacacacccgagagagcac

SEQ ID NO: 253183 - RNA, 54 nt, Homo sapiens
aggcgacccggggaaagacagcccacagccagacaggagggcgaaaggaaccag

SEQ ID NO: 253184 - RNA, 55 nt, Homo sapiens
cgcagggcgcccccggggacccccacgagcagacaagcaccgaaaggcaaacaac

SEQ ID NO: 253185 - RNA, 88 nt, Homo sapiens
caggcggagcaggagcggcggcgacggccacaggggcggcgacggcgcaggcgaagcgaaacaggaaagaccacagcaagaccacgcc

SEQ ID NO: 253186 - RNA, 69 nt, Homo sapiens
aaagacagaccccaacaagggggaagaaaccagcaggcaaccaaaggcgcggagggccaacagaagaaa

SEQ ID NO: 253187 - RNA, 75 nt, Homo sapiens
acgcagggaagagaggacagcaggagggcggagacaacagaaacagaaacgagggaaacaggggagccaggacag

SEQ ID NO: 253188 - RNA, 73 nt, Homo sapiens
agaagcgggagaagccggaaggggccggcaggaagaaggggacacgcacgaaccgacagcccacacgcacaga

SEQ ID NO: 253189 - RNA, 78 nt, Homo sapiens
ccaccagccacagggccccgaggcagaggggcagcgccccagccggcacacccgcgcaggggaggaacaacgggagcc

SEQ ID NO: 253190 - RNA, 61 nt, Homo sapiens
cggaggagaagcaagaaggcccggacacagcaaaccgggccacaggggaaaaaaggccaga

SEQ ID NO: 253191 - RNA, 39 nt, Homo sapiens
cgagaaaggcaccacaccaccaggggacaccagccccgg

SEQ ID NO: 253192 - RNA, 86 nt, Homo sapiens
cccaaacaagggcggacagcagccaccagcgccagcacaacaaggacaagcccacaaggcccaacgcaccgggccacggacccgcc

SEQ ID NO: 253193 - RNA, 73 nt, Homo sapiens
aacgacaaaacggaagaacgcagaagacagcaacagagaaacagaagcggagagacagggacaagggggagcc

SEQ ID NO: 253194 - RNA, 54 nt, Homo sapiens
cagaacggcagcggagaaaacaaccagaaggcaaaaacccagacgaggaggcgc

SEQ ID NO: 253195 - RNA, 72 nt, Homo sapiens
accagccaccccaccgcgcagggaggagagcacaagccaacccgcccgaggccccccagaaggaccgaaccc

SEQ ID NO: 253196 - RNA, 74 nt, Homo sapiens
ccaccccaagaagaaaagcacaagagaaagaaggaagcggcgccgaaaaaaaggggaggaaaggaccccaagga

SEQ ID NO: 253197 - RNA, 70 nt, Homo sapiens
acagggccagcacgccaccgggaaggcggggaggaggccccaaagggcgaggacacagcaggggccagac

SEQ ID NO: 253198 - RNA, 73 nt, Homo sapiens
acgggcacccgcgccgggcaccgaggaccagccaagacaggaagaagagagggcgaaggaggccacacagaag

SEQ ID NO: 253199 - RNA, 83 nt, Homo sapiens
cggagccagaagcacagaccccaaacgggccagaagcccccaggaggagaacgagcaacggaagccagaagaagcacccccag

SEQ ID NO: 253200 - RNA, 83 nt, Homo sapiens
acccacggaacagcggaggcgaccccaggccaaacaaaagacggaaagaacaagggaaaagagcacgaggaggaggagcgaga

SEQ ID NO: 253201 - RNA, 91 nt, Homo sapiens
cacaagggcagagggccagagcccagaaaagaacagggaggccgcacagaggaggagcaccaaaccgagggagggcagccacaccacaaca

SEQ ID NO: 253202 - RNA, 103 nt, Homo sapiens
agaggccgccacaaccgccagacaaccggagccacgccccacgaccgccaggagccggaccagaccgccggagcacgccgagaccaccgaggacacaaccgcc

SEQ ID NO: 253203 - RNA, 68 nt, Homo sapiens
gcaaagcgaaggaagcaaacaacgcacccgcccccaaagagagaagcggaccacaaggggcgggccca

SEQ ID NO: 253204 - RNA, 42 nt, Homo sapiens
gagcgggggcgcgcggccgcgggcacagggggacgaaacgaa

SEQ ID NO: 253205 - RNA, 71 nt, Homo sapiens
gcaacacggccacggacaagaaggccggagcagccaccccgcagcaggcgcaaaaacgaacccacaaccga

SEQ ID NO: 253206 - RNA, 77 nt, Homo sapiens
gccggccgaccgcaccacaagggcaagggcagccgcaccaccgccgcgcacagaaggcagaagcccggccgccccgc

SEQ ID NO: 253207 - RNA, 72 nt, Homo sapiens
gaaaggaaggaaaccaagcacaccacagcgcgggagccaggaaacgcagaccccccacgagaagcaggcaga

SEQ ID NO: 253208 - RNA, 52 nt, Homo sapiens
agagaagcaaagaagcagaaggacaggagaaacaggggccaaaaaaccaaag

SEQ ID NO: 253209 - RNA, 61 nt, Homo sapiens
caaggacgaggcggaaaggaaccccaaggcggaggacacaccggaacaaagaaaaccaaaa

SEQ ID NO: 253210 - RNA, 78 nt, Homo sapiens
cgaccacaaggggaggacaaccgcccgggaccagagccagagcacagagcaccacgaacaaacagaaagcgcgaagag

SEQ ID NO: 253211 - RNA, 63 nt, Homo sapiens
ggaccccgaaggagaccacaaaggaccagcagaggcaggaagggcgggcgagggcgcgcacag

SEQ ID NO: 253212 - RNA, 82 nt, Homo sapiens
gagaagcgaaagacacacgagcgcagaagaagacagcagaggcagcagggaaacagcagacagcccccccaacagacaggca

SEQ ID NO: 253213 - RNA, 70 nt, Homo sapiens
cacgaaggcagaggaaacgaggagccggccggaacaagccccgggcgcacaccagggaaaagaaaggaca

SEQ ID NO: 253214 - RNA, 69 nt, Homo sapiens
acggagccaggagcgcccagagcgccaagaggcaaaccaaccgcgaccagaagaaaggagccacaccag

SEQ ID NO: 253215 - RNA, 77 nt, Homo sapiens
aaaagcgcgccgacgggcacaaggccaagcaagggccagaagaacgaccaaaggaaaggaggacggcggacgaagga

SEQ ID NO: 253216 - RNA, 77 nt, Homo sapiens
aaggggccaaccaaaggaaagcagacaacagcgcgaagcggacaagcacaaaacacaagggccagcaagcaagacag

SEQ ID NO: 253217 - RNA, 34 nt, Homo sapiens
aaaggccaagaaggcagaacccgcccagcagccg

SEQ ID NO: 253218 - RNA, 77 nt, Homo sapiens
ccacgagcccagccaccacccacagcgaggcccggagagaaggcgaggaagcccaagcacaaaggagaagacgccca

SEQ ID NO: 253219 - RNA, 70 nt, Homo sapiens
aggagacagcccagaagaacgaggaggggaaggaagccaaagagagaaaagcgaagagcagacagaacag

SEQ ID NO: 253220 - RNA, 73 nt, Homo sapiens
cggagcgagacgagaacccggccgcgcaagggaccggcgagcaggcggaaggcggcacaccgacagcgcgcgc

SEQ ID NO: 253221 - RNA, 72 nt, Homo sapiens
acggacggacgccagccccacaacagcaagcagggcaaagggcagagcgcgcccggccgccagggcggaccc

SEQ ID NO: 253222 - RNA, 74 nt, Homo sapiens
ccagaaagcacaaccaaagaaggccacaccaggcgaacccagcgcaccacgacaaagaagagaaaacgcggcag

SEQ ID NO: 253223 - RNA, 48 nt, Homo sapiens
ccgaaaaaaacccaggcggcccagggaaaagaaggaggccagcgggac

SEQ ID NO: 253224 - RNA, 76 nt, Homo sapiens
gcggcgcgaccaggcccggcgcgcgcccccaggggcggccgcggcgccgggcgccgaggaacagagacagacccgg

SEQ ID NO: 253225 - RNA, 56 nt, Homo sapiens
gcagccgacgcgcccagcggggacaagcccaggcccagaaggggaagacccccagc

SEQ ID NO: 253226 - RNA, 65 nt, Homo sapiens
gagaccgagggaacccacccccacccaaggcaccaaaaacagagccacccaccagggagcaacca

SEQ ID NO: 253227 - RNA, 84 nt, Homo sapiens
gagcgggaggggaggccgcggaacgcccggcgccaggaccgcggcaaagcccaggcccgggcggccagccccagcccgcgccgg

SEQ ID NO: 253228 - RNA, 64 nt, Homo sapiens
caagcaggaccacccaccagccaccagcccgcagggccccggaccccggcccaggagcgcccca

SEQ ID NO: 253229 - RNA, 76 nt, Homo sapiens
gggcagaggaagcgccgccaggcccgcaggaccgccggagacagggcaagagggagaagaccaaagaagagagagc

SEQ ID NO: 253230 - RNA, 79 nt, Homo sapiens
cccgggcgggaagacagaaccagggccgggggccagggacacagacacagaagagacggaggaagacaccaagagagca

SEQ ID NO: 253231 - RNA, 90 nt, Homo sapiens
gcagaggcaaggggccaccaggaggccagggggcgccagggggggccgaagaagccagggggaggaaagcagacagacccaccaagaggg

SEQ ID NO: 253232 - RNA, 76 nt, Homo sapiens
aaagccccccaggcgaggcggcagacccacaccgaaggcagagcggacagcaaaaggagaaaaaccgcacaaaggc

SEQ ID NO: 253233 - RNA, 55 nt, Homo sapiens
gcgggacggacaggcagggaagcaacgcagaggaaggaagggaacacggacgacg

SEQ ID NO: 253234 - RNA, 54 nt, Homo sapiens
aaagagaagacacccaaggcccagaagccgaaaagcaaggcccccacaagcaac

SEQ ID NO: 253235 - RNA, 71 nt, Homo sapiens
aacaccaggaggccccgcggggcaaacggcaccgacgagagggcgcaccgcgccggagcccgaccgcgggg

SEQ ID NO: 253236 - RNA, 56 nt, Homo sapiens
ccccagcacacagccagagagccaggaagcaaggaggcggcccgcagacggcccca

SEQ ID NO: 253237 - RNA, 56 nt, Homo sapiens
gagaaggaccagaacaggccgccaaaggaggcacacggagaaaaaaggagcccgaa

SEQ ID NO: 253238 - RNA, 76 nt, Homo sapiens
ccgaccgcagcaaaaagcagcaacagaaccgcggaggagccagcccagaaccggaacagaacaagcagcagaggaa

SEQ ID NO: 253239 - RNA, 42 nt, Homo sapiens
aagcgacgagccgcgaggaggcaccgacgagagggcgcaccg

SEQ ID NO: 253240 - RNA, 85 nt, Homo sapiens
gggcggaacgacccagaaccggcgaggagaggcagagcgaaccagaacaagggaccccccaggacacagcgggacgacccaagcg

SEQ ID NO: 253241 - RNA, 76 nt, Homo sapiens
cacacaccggccaaagagcggaaaggcaaaaggacaggagagggaaaagcccagccaaccagaaaaaaaggaaacc

SEQ ID NO: 253242 - RNA, 74 nt, Homo sapiens
gcaccacaaaaaccacgagagcccgcccaacaaacagaggacaggggaagaagacgccgaacaacagccggaca

SEQ ID NO: 253243 - RNA, 72 nt, Homo sapiens
gaacggggcgcccaggccgcccgacccaaagggaaaacagaaacagggacgcacaccgagacgaacacagaa

SEQ ID NO: 253244 - RNA, 82 nt, Homo sapiens
gcggaccaccggcggggaggagaccaggcgacaccgcgacaccccaacaaacaccagcgcggacgaccgagccccagaccca

SEQ ID NO: 253245 - RNA, 108 nt, Homo sapiens
gggaacaggccgaggaggacggagccgaggaccgagaccgccccaaaccgaggagaaggcagagcccccccaggcagaagcccgagcgggaaccagcgaagccagggc

SEQ ID NO: 253246 - RNA, 95 nt, Homo sapiens
cgcacagcgcccccgcccgcccccacccgcggcagcgggcagaccagaaacgggggcagagccggccaggggcaccggaaggagccacaaggggc

SEQ ID NO: 253247 - RNA, 54 nt, Homo sapiens
agagcaagcgggggaccgaacaaggcaaaagggcaggaggcaaagggaccccaa

SEQ ID NO: 253248 - RNA, 65 nt, Homo sapiens
agcaaagcccccaacaggagaagagagaggacagcggccggacgcagacccacacagcgacagga

SEQ ID NO: 253249 - RNA, 76 nt, Homo sapiens
cgaggcagacggggcggagaagggcagggcgagcgcccccgccagggccgaccagacccggaacaaaggacccagc

SEQ ID NO: 253250 - RNA, 83 nt, Homo sapiens
cgaccagccgcggagccgggggcagaaacccgagaggagcaggagcaaccgacaggcgggccggacagcgcgcccagcacagg

SEQ ID NO: 253251 - RNA, 75 nt, Homo sapiens
gagaccgagagcccgcaccaaacagagcagcagcagcagagagaaacagcagggaggagcacaaacgcccaccac

SEQ ID NO: 253252 - RNA, 61 nt, Homo sapiens
cagacgacaagccgggagcgggcggccaaccagacaagggaggcgaggacggacaaaagga

SEQ ID NO: 253253 - RNA, 68 nt, Homo sapiens
ggacaacgccgaaaacgaccacacggaccaaggacccgagaaacccccagacagcgagacgaccaagc

SEQ ID NO: 253254 - RNA, 56 nt, Homo sapiens
gggaaagcaggaccgaccaagagcaccgacacgcgggcacgggcccggaccagcca

SEQ ID NO: 253255 - RNA, 77 nt, Homo sapiens
aaagcgagcgcgaggaaaaggcggcgggagaagggaaaagggacccaaagcccaaagagaccggacagaaacaaccc

SEQ ID NO: 253256 - RNA, 81 nt, Homo sapiens
cgcggggacccggagggagcccggcggccggcccccggggccaccacgccgaggagggcggaggggacagcagaccggaga

SEQ ID NO: 253257 - RNA, 83 nt, Homo sapiens
agagaaggcagccgagcaccgagccagcccaggaaaaggagaggaagagaagaccgccaaagggacagagcgacaggaccggg

SEQ ID NO: 253258 - RNA, 34 nt, Homo sapiens
gggggggccgcacaggcagaaagaagacccagag

SEQ ID NO: 253259 - RNA, 66 nt, Homo sapiens
gggacacccgggcggggcagagcagcccccagccagccgcgaggaccagccaaggaagcaacacag

SEQ ID NO: 253260 - RNA, 94 nt, Homo sapiens
gagcaagcgagccagagcccacagaagcaggaagagggcggacggcagacaggcagcaaccggccccgcccaccagccccagcccagggggcag

SEQ ID NO: 253261 - RNA, 73 nt, Homo sapiens
gaaaacacacaacaacagcaagagaggaaaaaacacacacccagcaaagagaacaggaacaacccagacaccc

SEQ ID NO: 253262 - RNA, 66 nt, Homo sapiens
ggcagcgcgacacgcaaccccacggggcaacagccagagggccgagaagaaaccgcaagaaagaaa

SEQ ID NO: 253263 - RNA, 78 nt, Homo sapiens
ccagccgaccccgcaccaacgcaccccagaacccaacaccccagcccaggggccagggacgcccgccacggcccgcca

SEQ ID NO: 253264 - RNA, 73 nt, Homo sapiens
gaaggaccaagaaccagggccagaagcccccaggaggagaacgagcaacggaagccagaagaagcacccccag

SEQ ID NO: 253265 - RNA, 73 nt, Homo sapiens
acaaccccaagcgccccgcaaggacggaccagcaagccgacgccacaacacgggcgacccagcaacgcggccg

SEQ ID NO: 253266 - RNA, 75 nt, Homo sapiens
gggggcgaggagacaaaaaagcccaagcgcaccgaaaagaccggaggcaaaagaggaaccgacccaacacaacag

SEQ ID NO: 253267 - RNA, 58 nt, Homo sapiens
gcgcagaaagagagagcacaggagcacaggagaagagccccgcagccaaccagaaggc

SEQ ID NO: 253268 - RNA, 74 nt, Homo sapiens
gacacccggaaggcaccggcccgaccagaggacgcaagacccgcccccaagggagcccacaggagacaaaagcc

SEQ ID NO: 253269 - RNA, 79 nt, Homo sapiens
aaccacaagccacaaaagagacgcaccgggcagggcaccaagccgggccgcggggggacccgagcggccccacggccga

SEQ ID NO: 253270 - RNA, 70 nt, Homo sapiens
cggacccggcggacaaagacagaagcagaacggaaaaagcaaaagcgagaagaagagaaaaggaagaacc

SEQ ID NO: 253271 - RNA, 68 nt, Homo sapiens
ccgcagcccagaccagaacaagacacaagaggacagccggaacaaagaagaggagcgcgcgcccaggc

SEQ ID NO: 253272 - RNA, 59 nt, Homo sapiens
gccacccgccggccggaccaggggggagcccaaccccagaaggaagccacaagagggcg

SEQ ID NO: 253273 - RNA, 87 nt, Homo sapiens
ccggaggcccaggcccggcagcccaacccagcaggacaagaacgaagcgcgcggcaggcgcgcgccgccccaggccgcaagacccag

SEQ ID NO: 253274 - RNA, 76 nt, Homo sapiens
aagcccccaggacagaccgagcccccggaaaccccagaagacgaccccgacgcaggccaggagccgcggacagaag

SEQ ID NO: 253275 - RNA, 81 nt, Homo sapiens
aaaggagaaaagagaaaggagcaaaaacaccaccacaacaaaagaacaccaacaagaccagaagccaacaagagaaaaaca

SEQ ID NO: 253276 - RNA, 87 nt, Homo sapiens
ccgacgccccgccgccgccgaggaggcgagcagccgggagacaccgccaccgccagagccgacaaaaggacaaggggcgaagcccgg

SEQ ID NO: 253277 - RNA, 70 nt, Homo sapiens
gacgaacagaacgaacagaaagagaagcgagcccaaaagcaaagcagggcagcaaagaacacaaaggcac

SEQ ID NO: 253278 - RNA, 75 nt, Homo sapiens
caagccacacaacgagacggggccggagccaagccccccaggagaagggagcacaggaaaacggaaagagacgag

SEQ ID NO: 253279 - RNA, 76 nt, Homo sapiens
accacccccacaccaagccaccggacccagagggacaaaaagagccgagcagcgggacccaccgggaagaggggac

SEQ ID NO: 253280 - RNA, 73 nt, Homo sapiens
accagacaaagggagaggggaccgacacccaacagaacaaaccaggggagggaaacgagaaaaacgacgccag

SEQ ID NO: 253281 - RNA, 74 nt, Homo sapiens
caagccccgcccagaagcgcaacagacggggaaggaaagcccaagaggaacagagcgccgacccacagaaaagg

SEQ ID NO: 253282 - RNA, 85 nt, Homo sapiens
gggaaaggaggcagcgcaaggagggcggcgggacgcaccgaggccagaccgccgagagacgagagccgaggcgccggaaacaaca

SEQ ID NO: 253283 - RNA, 72 nt, Homo sapiens
gcgaaaagaagcacccccagagaaagccaagggagacaacggccgagccaccgcaaacggcgggcggcgccc

SEQ ID NO: 253284 - RNA, 59 nt, Homo sapiens
aggcacacggcagccaacaaggcgaaggacggcaagacgaggcaaaaagacacagaaca

SEQ ID NO: 253285 - RNA, 61 nt, Homo sapiens
cgcgggagccgcgcccgaaccccggcccgaacccagaaagagccgcagacgcacagcaacc

SEQ ID NO: 253286 - RNA, 77 nt, Homo sapiens
gccaaaaaagacacacgcccaagagcgggcaccaggccaagcaggccgccggggaggcgccagggcgacagggcagg

SEQ ID NO: 253287 - RNA, 74 nt, Homo sapiens
gcgagcccccacacggcgcgccgggcgagcccaggggcagccaccgccaggaccccagaaaaagacccaagaac

SEQ ID NO: 253288 - RNA, 65 nt, Homo sapiens
gaaagcaagacgaaacaaaacaagggacgaacagcaaggacaggccaaggaaagagccagcgggg

SEQ ID NO: 253289 - RNA, 73 nt, Homo sapiens
agcaaccgcagaagcagcggcaaccagaccggggcagcgagggaaagcgaaggaaaaagaaaagaacgcgagc

SEQ ID NO: 253290 - RNA, 83 nt, Homo sapiens
acgccgcaggagggccaagagggcgcccgcgccggcagaggaggcgagcacccgccagggagaggaacccccgcgcacccagc

SEQ ID NO: 253291 - RNA, 73 nt, Homo sapiens
gagcaaagagccgacacacacggagaaagggaagcacgcgaagagaacaggaagcgggcaggaggccagaggc

SEQ ID NO: 253292 - RNA, 70 nt, Homo sapiens
ccgcagaggaagacccgccggacacaagagggcaagaaaggcgcgacgggccgaaaagggacgaaggggg

SEQ ID NO: 253293 - RNA, 71 nt, Homo sapiens
aaggaacagaaagaagcagaccagacagaacaagcgcgaccgcgggagcacaggggaggcagaggcgcacc

SEQ ID NO: 253294 - RNA, 74 nt, Homo sapiens
ggagcaccaaaaagaagaaccgcgccaaggaaggacgagcccccgcggagacagcccgaagaacccgaacgcaa

SEQ ID NO: 253295 - RNA, 83 nt, Homo sapiens
ccggccgcgcccgggagcggcgccaggccggagcgcgacacggagacaggggcagaaccggggagaccacgacgcgccccggg

SEQ ID NO: 253296 - RNA, 90 nt, Homo sapiens
ggcgcaaaaggggcggaaccacgcaaacacacagaccccgaaaagaccacagcgccaaagagaagagaaggagccaagacacgcacacca

SEQ ID NO: 253297 - RNA, 76 nt, Homo sapiens
ccagaggaggccccccagccacgggaaccgcggaaaccgcggccggcacaaaaccggcacacaaaacccgaaagcg

SEQ ID NO: 253298 - RNA, 114 nt, Homo sapiens
ccccaccccgagggcgagacaacaagcacagccacggcccagcagaacaggccaaacgccagaagcagcgaaaaagaacacaaaacggcagaaccagcaaaagacagaggccaa

SEQ ID NO: 253299 - RNA, 72 nt, Homo sapiens
cgagaaaccaggcggccagacaggagggccccaaggcggcagccccgaccgacggggcaacgcgaagaaaca

SEQ ID NO: 253300 - RNA, 75 nt, Homo sapiens
cggcgccccggggcccccgggcgagcaaacaggaggaaagacaagccccaaaagcagccgggaaaggagccggcc

SEQ ID NO: 253301 - RNA, 56 nt, Homo sapiens
gagggaagcggaaccaaccgggaaagcccggggcaggggcgaagggagaaagcaga

SEQ ID NO: 253302 - RNA, 59 nt, Homo sapiens
ggcagccgcgcgagcgcgggcgcgcgagcagccgccggcaggacaggagagacaacgga

SEQ ID NO: 253303 - RNA, 37 nt, Homo sapiens
ggacaagaagaacgcccggaccccgcgcccacccaac

SEQ ID NO: 253304 - RNA, 66 nt, Homo sapiens
cccagccggcccgcgggggagccccgggagccgcacgaccgaggccaaaagaaaggaagaaaaccc

SEQ ID NO: 253305 - RNA, 69 nt, Homo sapiens
gagaggcagcaaagagccaggcggcaaagacgcaacaacagcgagcaagagaggaacgcgaagcagaac

SEQ ID NO: 253306 - RNA, 56 nt, Homo sapiens
gaagagaacacaaagagggggagaaaccagaaagaagccagcagaggcaccccagg

SEQ ID NO: 253307 - RNA, 80 nt, Homo sapiens
cgacccggcgccaagaccaacaagaaaaacccaggaggcaagaacagaagaccggggaccagaagggagaagaagcaaaa

SEQ ID NO: 253308 - RNA, 70 nt, Homo sapiens
aacccgggacgacggagcgcgacagagggagagcacccgccacaggccacaaaggaggcaggcccgggag

SEQ ID NO: 253309 - RNA, 85 nt, Homo sapiens
cgaacccgaggcccgggcgcagccgcaccaagcgcggccggcaagaagaacaagagcgaagacccgaaaacgccaacgccagcca

SEQ ID NO: 253310 - RNA, 85 nt, Homo sapiens
ggcgagccaccggggagccaccgcccagcccaaaccaggagagcgagggagcgagcgggcagcgcggccgggcgaggaaaacgca

SEQ ID NO: 253311 - RNA, 73 nt, Homo sapiens
gcacagcggcagagggcaacgaaacaccggaccgaaagaacgagcgcgaccagggcgacggggcaagcaaggg

SEQ ID NO: 253312 - RNA, 75 nt, Homo sapiens
gcccgggcgcagaccaaagccgacgagccccggagcaggcgacagggaaagcaacggcgcaagcggcggcggcgg

SEQ ID NO: 253313 - RNA, 74 nt, Homo sapiens
gaggcagcccgcggcaccgggggacaggggcggcagagccagggccccgcggggagcaggcggagaagggggaa

SEQ ID NO: 253314 - RNA, 86 nt, Homo sapiens
gagacacagaacgcgcccagcaaagcgaagccacccggggaaccccagcaagaccggcggagagacggagacccggacgacacggg

SEQ ID NO: 253315 - RNA, 76 nt, Homo sapiens
cgaccaaagggcgcaaggcccgagcagcaaacacaaacaaccccgaacacagagaacgcaccaagaacagcgaaac

SEQ ID NO: 253316 - RNA, 58 nt, Homo sapiens
cccagcaaagccaggacccaccacgccggcagggccaggccaccagacgaagaaaggg

SEQ ID NO: 253317 - RNA, 84 nt, Homo sapiens
cagggggccagccaggacacacagacccagcggaaccgaagcaggccaacagaccagcagcagcgcgaaaagcagcgcccggca

SEQ ID NO: 253318 - RNA, 85 nt, Homo sapiens
cccgggggcagcagcaacgccggacgcccacgcaagcagggaagaaaacgccagagaagcagagcagcccggagcgaggggagac

SEQ ID NO: 253319 - RNA, 95 nt, Homo sapiens
gaacgggagacggaagacaagaagccaaagagcggaggcggcccgcgggcggacgaaagaaagaaggagcaccaacgcaaagaaaaagaccaaga

SEQ ID NO: 253320 - RNA, 113 nt, Homo sapiens
gcggagcgggcggccgccaccgagcggcgagcaaccgcagccccgcggccgagaggcagcgaagccgagagcgccggaggaccacacccggccacagccgcaggaacaagaga

SEQ ID NO: 253321 - RNA, 66 nt, Homo sapiens
gacgccagcacaaacacggaagaagacaagagcacagacaacagcagcgccgagaaaccggcagcc

SEQ ID NO: 253322 - RNA, 58 nt, Homo sapiens
agagaaaaagagcggcgaggaacccagaaacaagcccagcgacccaacagagacccgc

SEQ ID NO: 253323 - RNA, 95 nt, Homo sapiens
gaggggcgaaaacagacccggagaaagacggccagcaaggggaaccacaggaacgggaacgcgaagagacccccaggccaaagcacccaaaaacc

SEQ ID NO: 253324 - RNA, 84 nt, Homo sapiens
aggacgagacccaagcccgcaagcggaggcccgggcaaggggccagaacccaaccagaacccgcggacgcgcgcccaagcaggg

SEQ ID NO: 253325 - RNA, 72 nt, Homo sapiens
agcgccacacacgcccgcccgcccagggaaccaccagcaccaaggggacaagggaaaacaacagggaggaaa

SEQ ID NO: 253326 - RNA, 70 nt, Homo sapiens
gaaccacaaaaggcacgggaggggagagagaaccggcacaccggagcaacccagaacacagcggaggaaa

SEQ ID NO: 253327 - RNA, 80 nt, Homo sapiens
gcaaggagggacccgaacccacgacacggccgccaccggggaccgcaaggccgcggggcccaacaaggcaagacacagcg

SEQ ID NO: 253328 - RNA, 87 nt, Homo sapiens
ggaccgccgccgggagcggaaacagcggcagccagagcaggagcaggcagcaccccaaagccgagaccacaccgaagaaaaaggccg

SEQ ID NO: 253329 - RNA, 75 nt, Homo sapiens
ggggaccggggggccgggcgcagaaggacagacgaagccaagaccggggacaagaaaccccgggccgacacaacc

SEQ ID NO: 253330 - RNA, 73 nt, Homo sapiens
gaagaagagccgcccccaccagacgaggccaccagccagggaacaggagggacgccaaacaggacagccgaag

SEQ ID NO: 253331 - RNA, 73 nt, Homo sapiens
gcagcgcgaacagagcggaagcaagggccagggaagcaagaagacacgaagacaacacacccggacggggaga

SEQ ID NO: 253332 - RNA, 78 nt, Homo sapiens
cacagcaaacccacccagcacaccccgcgaaaggaggaggcacagaacgaaacggaggagcccaggaggaagaagaag

SEQ ID NO: 253333 - RNA, 61 nt, Homo sapiens
gaggccaggagccaggggcccagaagcaagggaacaggccaggggccgcacagacacagcc

SEQ ID NO: 253334 - RNA, 75 nt, Homo sapiens
acaagaagggaagggcagaacgagcggagagccgggacacaaggagaaacggagagccggacgaaaagagaggcc

SEQ ID NO: 253335 - RNA, 84 nt, Homo sapiens
cccaggcgaagaagcgcagccgcaccggccaagggggaggcaagcaggggggcaaaggaaagaaggcagaaagggaggccagga

SEQ ID NO: 253336 - RNA, 77 nt, Homo sapiens
agcacacaaggaccaccaagcagacaacgaagacaacccagggaccccagcgcgcggcagaccaccgcaccccgcag

SEQ ID NO: 253337 - RNA, 62 nt, Homo sapiens
cgcacgccgaccggcgccgggagaccgggaagaaaacaggcgaaacaaggcacccccagcgc

SEQ ID NO: 253338 - RNA, 108 nt, Homo sapiens
gaagaaaggccgccacacacaagcaggcagccagcccagaacagagaacaggacccacgaggaagcggccgcggcgaaccccagagccagcgggcagacgaacagcac

SEQ ID NO: 253339 - RNA, 62 nt, Homo sapiens
ccggaggagcagcagaggggcgagcaggagcgaccgcgccaaacaggcaaccagacacacaa

SEQ ID NO: 253340 - RNA, 72 nt, Homo sapiens
aacggggaccccggagcccagaagacagagggcgaggccaaaacccagagaagaaagaagaagaaagcggca

SEQ ID NO: 253341 - RNA, 83 nt, Homo sapiens
ggcagcgccgaaccaggaccggacccggacccaaaggccagcaaagccaccggcagagcaaccagacgcgggagcgcgcgagg

SEQ ID NO: 253342 - RNA, 78 nt, Homo sapiens
gcagcacggggaaggaccggacccggcccgggagcaaaggacccggaaaaaagaggagcggaggagcggaccgcacac

SEQ ID NO: 253343 - RNA, 84 nt, Homo sapiens
aaaaaggacaaaagccaagaggaggacagcgcacacagcaagcacgaggccggcagaggccgcccagacagagcacagggagcg

SEQ ID NO: 253344 - RNA, 80 nt, Homo sapiens
caggaagggcaacaccgcgccaagccgggggcacacagagaaggagacccagggaggcccgaccggcgaaagcccagggc

SEQ ID NO: 253345 - RNA, 85 nt, Homo sapiens
cgcccggacgccacgcacccgcgcgagaagcacaaagacaagcaggcgcggcaggaccgaccacaagacacagagaacaccagag

SEQ ID NO: 253346 - RNA, 58 nt, Homo sapiens
ggacacacacccggagaacaagaaagggaagaccccggaaagggacagggcagcggcc

SEQ ID NO: 253347 - RNA, 72 nt, Homo sapiens
gagacgaggagaaaacccagaaaaaagggcagccccagaggaccagaagaagaagaagggacagagaagcaa

SEQ ID NO: 253348 - RNA, 56 nt, Homo sapiens
ccaaccaaacccccaaaccgacagccccaaagaggcgaaagaagaggaggaagagg

SEQ ID NO: 253349 - RNA, 70 nt, Homo sapiens
agcaaagcgccaagggccaaaccacaaaagaggaccaacagaaccaaaggaggaaaacaaggaagggagc

SEQ ID NO: 253350 - RNA, 79 nt, Homo sapiens
cagcgagcagagcggacgcccccaggagaaacgaggagcgcggccaccccccggacagacgacgcccgaagcaaaagcc

SEQ ID NO: 253351 - RNA, 66 nt, Homo sapiens
gggaaaaaacaggagcacaggaagcagaagacagcgacagcacaaacgcccagacaaggcgagaaa

SEQ ID NO: 253352 - RNA, 41 nt, Homo sapiens
acgcagcaaaccaccagaagcgccacccgacagagaaaaac

SEQ ID NO: 253353 - RNA, 110 nt, Homo sapiens
caccggggcccggcgcaagggggcaaggaccaaggcccccccacccgggaggcagcaggcgggagcggaggccgagcgggcccagcgcagagcagcgcagcggagcagga

SEQ ID NO: 253354 - RNA, 72 nt, Homo sapiens
ggaggagaacaaagagggaaggagacagccagagaccaagcagaagaaccgcgaaaggcaggcagcccacag

SEQ ID NO: 253355 - RNA, 77 nt, Homo sapiens
agaggagaagagggacggcccagggcccgccccaccgggggccaccccagggaggagaagagggacccagaaggcga

SEQ ID NO: 253356 - RNA, 80 nt, Homo sapiens
gggaaacgaagggcagaagacaaagcgcagaggggcaagccccagagcccccagccggcggcgggcaaagagccagaccg

SEQ ID NO: 253357 - RNA, 38 nt, Homo sapiens
cggcccccaaaggcggaacagagacgagcacaacacac

SEQ ID NO: 253358 - RNA, 83 nt, Homo sapiens
gcggaggagccccaagaacagagcaggagaagaaaggaagagacgacagccagcaggcaggagcccgcccagaacaccccaac

SEQ ID NO: 253359 - RNA, 75 nt, Homo sapiens
agaaggaccaagaaccaggacccaagaagaacagaaggaagacaaagagacggcacccccaaagaagagcaaaag

SEQ ID NO: 253360 - RNA, 62 nt, Homo sapiens
aaggcaccggcccccacgggcggcgcagggggagagacaaaggaggcacagacccgaggaag

SEQ ID NO: 253361 - RNA, 75 nt, Homo sapiens
cgacccagccggggggcacagccgggaggaaaacccaccaccacgacgggggcagccaccccccggaaacaccgg

SEQ ID NO: 253362 - RNA, 54 nt, Homo sapiens
gaagggggacggcaagagcaacaagcagagcaaagggagagaacagcacacaga

SEQ ID NO: 253363 - RNA, 76 nt, Homo sapiens
gagcccggcgggggcgcaggagggagacagagggggcacccagaggccggggaccgccaaccccccaagaagcaga

SEQ ID NO: 253364 - RNA, 74 nt, Homo sapiens
ccagggggaaggaggaggaggacgacaggcaagagaccgcaaggcagacacggcgacccgcagggcaggggcaa

SEQ ID NO: 253365 - RNA, 81 nt, Homo sapiens
agcgaagacgcgcggccaggagcgcggagcggcccgcgagcgcagagagccaggacaaaaccaggcagaaccaacacgaac

SEQ ID NO: 253366 - RNA, 68 nt, Homo sapiens
gaaaccagaaacgcacaggaagagcgagaaacgcggaaagaagcagaaggagaccgcgccaccccaaa

SEQ ID NO: 253367 - RNA, 79 nt, Homo sapiens
aaagacaaagcgaaacaaaacgcacggaaagacccagaaagccaagacaaaggaaaaggggaggcaaggcaagagcgaa

SEQ ID NO: 253368 - RNA, 75 nt, Homo sapiens
gggcgcgcagacggagggccgcgccacaagcagcaggccaaggcgcgaacaggaaaaaaaagaaaacaagcgcac

SEQ ID NO: 253369 - RNA, 71 nt, Homo sapiens
acaaaaaggccagaaagaggagcagagacgccggacaggaacggagacagccagacacgagcacaaagcgc

SEQ ID NO: 253370 - RNA, 82 nt, Homo sapiens
ggacgggacagggcgggggacacgcaggagagccccgcgaccacggcacacgcgacagagacgaagaggagcagaaccagaa

SEQ ID NO: 253371 - RNA, 77 nt, Homo sapiens
cgccagccagacggcggggcccggcagcgccgggagccgagggccagagacaagggccaggagggagggcacggagg

SEQ ID NO: 253372 - RNA, 86 nt, Homo sapiens
gagcacagagcccgccgccgaccgccgcccgccacacccgccgccagagagaagaagaaggaggccgcggccagaaacccaagaaa

SEQ ID NO: 253373 - RNA, 75 nt, Homo sapiens
acaaagcagcagacccacgggcccaccggaacagagaacaagcagcacaacacacagagacgggacgaacaacac

SEQ ID NO: 253374 - RNA, 68 nt, Homo sapiens
aacagagcaaaaaccggaaaggagacagaaccagcaaaggaaagaagcaacgaggaccaaaaacccac

SEQ ID NO: 253375 - RNA, 104 nt, Homo sapiens
gggagcaccgcacaccccacaaccgaggcccaacaacaaagccgagacgcagggggaagggacccaggcacggcgcgacaaccggaaggaccggggacgggccc

SEQ ID NO: 253376 - RNA, 81 nt, Homo sapiens
ccccgcccgaccgcgagcgccgcccgggcagcgaagccgcccccccgggaacaagggaaaaaaggcacgccgagcccaaag

SEQ ID NO: 253377 - RNA, 90 nt, Homo sapiens
ggggcgcgccgcagagcggcaccgaaggacaggagggcagccgacagggaagagcagaacagcccaagggacccgacaaacaaaggaggg

SEQ ID NO: 253378 - RNA, 72 nt, Homo sapiens
caacggcacagaaccgcagcagggacgcgggcacgggaccggcgaggacggaacagaaagacaacggacaag

SEQ ID NO: 253379 - RNA, 70 nt, Homo sapiens
aacaggcagcaggaagcacggcgggcgaaacagaaagcaccgggaggaaagagagccacacgaagaacac

SEQ ID NO: 253380 - RNA, 59 nt, Homo sapiens
aggcacaagggacaagacagcccaggccgggaaaggaagaaagggacacagcgagagag

SEQ ID NO: 253381 - RNA, 58 nt, Homo sapiens
cacccgaaccaagaccaggacccagcagccagcgaagccccaaggaagccgggacgcc

SEQ ID NO: 253382 - RNA, 79 nt, Homo sapiens
gaggcggggggaccggcgggcgggcgaacgagaagaccgcaagcggggcggaagcggcagcaggagccacggggaagac

SEQ ID NO: 253383 - RNA, 80 nt, Homo sapiens
cgccggacaaccgccccgagggaagggaggcggcggccccaaaaaaacggccagaggacccccaggccaccgggaaaggc

SEQ ID NO: 253384 - RNA, 81 nt, Homo sapiens
gaccgagagcgcgaaacgcacgagaagaacgagcccaccgcaagggagccacaggggaacgccacaggaagccccagcacg

SEQ ID NO: 253385 - RNA, 76 nt, Homo sapiens
gaaagagggcacccacccacgaagggaggaaaagggcagggacagcgcaggcagcagacacgagaggcgagggacg

SEQ ID NO: 253386 - RNA, 75 nt, Homo sapiens
acaagaagaagacaaagaaagaaacaacgggccaacagcaggccaggaagggccggcccagggagaacgcaaaac

SEQ ID NO: 253387 - RNA, 54 nt, Homo sapiens
ggcggcaaccgagacacaaagggaaagcgagcccaaaaggcagagcgaggagag

SEQ ID NO: 253388 - RNA, 103 nt, Homo sapiens
caggaaacgccgagccgggcagccccccgcaccggcagggagaggcggacacagacaaggcccccggcaccagccggggggcgcggggaggcagggcagccca

SEQ ID NO: 253389 - RNA, 74 nt, Homo sapiens
ccacgaacaccagaccaccacccagcaggcggaagcagcgcagcacagcgagcaacacgacaaacgcccgggac

SEQ ID NO: 253390 - RNA, 61 nt, Homo sapiens
cgcagaggcaaggggccaccaggaggccagggggcgccagcccggaccgacaggaaagaag

SEQ ID NO: 253391 - RNA, 59 nt, Homo sapiens
gaagcagggccgacacaagcccgcagcggagccccgggcccagcaggaggcggcccccg

SEQ ID NO: 253392 - RNA, 76 nt, Homo sapiens
gcccacacagcaggcccgggcgaagagcccccccccaagggggcaggaggcaaagggcggggacaccggacaggga

SEQ ID NO: 253393 - RNA, 78 nt, Homo sapiens
gggagccccgaccgggagaggagagcccccaggggagccggcggaaaccccgccccccgaggcgcagcccgaacccag

SEQ ID NO: 253394 - RNA, 70 nt, Homo sapiens
gcacccacagaagagcccccacaacggggagaacagcccaaaaaaggacaagacccacacaaagggcagc

SEQ ID NO: 253395 - RNA, 73 nt, Homo sapiens
ccgcggccggcccggcggagaggggcaaagcaagagccacaacccgagacacggccgaaaacaaagaggaacg

SEQ ID NO: 253396 - RNA, 85 nt, Homo sapiens
ccccccccaccagaggacgggaggagcagcaacagagccaaggaacacgaggacgcaccgcggggcgccgggagggagaagccaa

SEQ ID NO: 253397 - RNA, 86 nt, Homo sapiens
gagggcaagcgcgcgccagcgcgagaagggcgacacacgaggcgcaccagagaccggacccgccagaacgggacggcaggaaacac

SEQ ID NO: 253398 - RNA, 113 nt, Homo sapiens
gaacagacacggggaagcgcaaaaacaagacggggcgccccacagaggggcgacgagaacaaacgaggaccaccggcagcaaaacacaagcagagagacagaaaggcccagcc

SEQ ID NO: 253399 - RNA, 87 nt, Homo sapiens
caccgagcccaagcggaaagcacgcgcacagagcagccacccacgcacccgcggccaaaacacgacaggggccaggacaacagagag

SEQ ID NO: 253400 - RNA, 74 nt, Homo sapiens
cgccagcagcccgcagaacacagcagagacaacacaggaggggaggcggacggggaacgaagccggaaagaggg

SEQ ID NO: 253401 - RNA, 78 nt, Homo sapiens
gcccccccgccgcccccccgcccgcccgccggccgcggccgggaaggcgcagccgaggccaagaagaccaagggaaga

SEQ ID NO: 253402 - RNA, 80 nt, Homo sapiens
cccaccgaacgaacacacgggacaaccagcgacgccggagcagcccaacccaggccaagagcccagggcaaaaacagacc

SEQ ID NO: 253403 - RNA, 79 nt, Homo sapiens
aaacccagacagacgccggggaggcagcgcgggacccagcccaggcggcgcggacggggcgggacacccgcaggagcaa

SEQ ID NO: 253404 - RNA, 87 nt, Homo sapiens
cgccggagcgcccggagcggccgcgagccaccgaggcccaggagacacgagcccacccgagaccacgccggacccgccccgccacag

SEQ ID NO: 253405 - RNA, 37 nt, Homo sapiens
cgcaggcaccggaccagcgggcgggaagaagcccgcc

SEQ ID NO: 253406 - RNA, 73 nt, Homo sapiens
agaccacacagaagaaagcacagccgacagaagccccccaggagagagaagaagcaacaacacacagaggacc

SEQ ID NO: 253407 - RNA, 51 nt, Homo sapiens
gaagaggaacaaaagcaagaacggaagcacgggcggaggaaagcacaagca

SEQ ID NO: 253408 - RNA, 77 nt, Homo sapiens
gcggaacgggagacgggaccaggcaccggcacggcgacgacggcgagcacaggccccagagggaagcaccagagagc

SEQ ID NO: 253409 - RNA, 68 nt, Homo sapiens
agaccccgcggcccggcagggggaacgggagggggcccacaccagaccagaaagaggggacgaagccc

SEQ ID NO: 253410 - RNA, 66 nt, Homo sapiens
ggaaaacacaccaacaaagccgggaaaggaaggacggcgcacaagagcaaaggaacgacgcaccaa

SEQ ID NO: 253411 - RNA, 72 nt, Homo sapiens
ccacacccgccagaagagcacagaaaaaacaccagcagcccagcaaccaaaaagaagaccgcacccaaacaa

SEQ ID NO: 253412 - RNA, 106 nt, Homo sapiens
cgaaagcgggagagggaccggaacggcggcgacaaggggcccgaacagaggggaaaacaaagagggaaaacggagaaaagcccccccaggccagcgcaggaacacg

SEQ ID NO: 253413 - RNA, 77 nt, Homo sapiens
accccaaagccccaccccacaaggaggacccaccagaaccgcaagcaagcgcgcggagcgcaggagaaagcgaccgg

SEQ ID NO: 253414 - RNA, 84 nt, Homo sapiens
aaaggagggaagaagccagaaccagcaaaccacccaaggggaacaaaacgacagacgggagggacaggcaagaaggaagaaggc

SEQ ID NO: 253415 - RNA, 70 nt, Homo sapiens
agagagagagagcagaagacgagaacacacaagaaaaacccggggaaggcaagacggggacgccagagag

SEQ ID NO: 253416 - RNA, 77 nt, Homo sapiens
gccggaagaaccgcagccgagcggggccggccacaggacagcccagagcaagcacacggaggcccgggagccagacc

SEQ ID NO: 253417 - RNA, 77 nt, Homo sapiens
aagaaaaagaagagagagacacggacaaggcagggagcacgcgggcaggcagcccagcaaacccaggcaagaacgga

SEQ ID NO: 253418 - RNA, 67 nt, Homo sapiens
gcgaaaagagagaaaaaacgccagaaaaacggaaacaacgggaggagagagcgccaagaaaggagac

SEQ ID NO: 253419 - RNA, 71 nt, Homo sapiens
accagcagcccccagagcgggaccacagaggacagagcagagccagaaagacaccagcgccgggcagaccc

SEQ ID NO: 253420 - RNA, 84 nt, Homo sapiens
aggacgggaccaggcgaagcggccgagcaggcgagcgaacgacgagccaggacaaaaccaggcagaaccaacacgaacccaagc

SEQ ID NO: 253421 - RNA, 47 nt, Homo sapiens
gacaagaccggcggggaagcggaccagaggagcgagagcagcaagaa

SEQ ID NO: 253422 - RNA, 78 nt, Homo sapiens
cccacaaagagggaccgcagccaacacacggagcacagagagacccaagagaagggccagaagagagaaaacaccggc

SEQ ID NO: 253423 - RNA, 36 nt, Homo sapiens
gggaggggagcgggcggagcgcagccagagccgaaa

SEQ ID NO: 253424 - RNA, 76 nt, Homo sapiens
cagaggccgccacaaccgccagacaaccggagccacgccccacgaccgccagcccaccgggacaccgacccaagcc

SEQ ID NO: 253425 - RNA, 79 nt, Homo sapiens
gcggaaacaggggagccacggcgccgggcccccagggacagggccccgcacggccagcccagcccacggagggcacccc

SEQ ID NO: 253426 - RNA, 59 nt, Homo sapiens
gccgccgccgccgcgcgccaaagcgcgccgccccgggcaaaagcaggaaaagcccaggc

SEQ ID NO: 253427 - RNA, 77 nt, Homo sapiens
aacacgaccagcgccccaagaacgaagcaggaagggaacgagcggcaaggcgaagaaggagagggaggaaacaggaa

SEQ ID NO: 253428 - RNA, 55 nt, Homo sapiens
cgggagccccgacacgacagagcaggcaccaagaaaggcaagccaaccggaagga

SEQ ID NO: 253429 - RNA, 70 nt, Homo sapiens
cccagcgcgcggccccaccgccagaaaaccagggaaaaagagggaggggccccaaacacgcaaagaaacc

SEQ ID NO: 253430 - RNA, 88 nt, Homo sapiens
gcggcagcggaagacaaaccacaacaacacagcagagccaggaggcaagccaagccaccgcagagacagaaccgaggaacgaacagag

SEQ ID NO: 253431 - RNA, 74 nt, Homo sapiens
accagcagccgccaaaggcagcgaaccaccgcaccaagccacagagcgaagaagcagaggcacggaagcaccag

SEQ ID NO: 253432 - RNA, 91 nt, Homo sapiens
gccaacggcccggacagaaggacacacccagccgcggcggagagaccacaggaacagggaaacaagccagaaacccaacgccacgaacaag

SEQ ID NO: 253433 - RNA, 79 nt, Homo sapiens
gcgaagaagacccgacaggaaggagaggcgaaagagcgaacgaagcggaagcaccagaaaacagccccgaaccagaaag

SEQ ID NO: 253434 - RNA, 62 nt, Homo sapiens
gcagcccgcggcagcaggacacagcagaccagccagccccaagcagccgcacgacaaagaac

SEQ ID NO: 253435 - RNA, 51 nt, Homo sapiens
accgggcaaagacaacggacaaccagaagagaacggccgagcgaccaggag

SEQ ID NO: 253436 - RNA, 73 nt, Homo sapiens
gggggaagaagaaaaccacaaggagagagcaacaaggagcagagccaagaagagccaggaaaaaggcaaagag

SEQ ID NO: 253437 - RNA, 58 nt, Homo sapiens
ggcggaagaaagggagaagggcggaccgccgggggccgaagggcaacacagcagaccg

SEQ ID NO: 253438 - RNA, 74 nt, Homo sapiens
caccgcgccaagggcacagaagggcacccaacccccgacaagcccagggaagacaaacccgccccccggggaaa

SEQ ID NO: 253439 - RNA, 76 nt, Homo sapiens
cagcagcagaggcccagacccccgccaggcagcaaagccccgggggcgccgagggcacaagggcaacgacagaagg

SEQ ID NO: 253440 - RNA, 84 nt, Homo sapiens
ggccccccacagaaaaggaaaggacaaggaagaggggagccaaagaccaagcaccagagaagaggaggaagaaggcgagaagca

SEQ ID NO: 253441 - RNA, 75 nt, Homo sapiens
accaagaggagacgaccagccacgccggaaccggaaacacaccagaggcgcagcagcgccacagcacaagcggca

SEQ ID NO: 253442 - RNA, 72 nt, Homo sapiens
aaaaccaaaaaaaagcggagcggaaaaagcaagcacacacgaagggggccccaggacccggacagacccaaa

SEQ ID NO: 253443 - RNA, 57 nt, Homo sapiens
cgagaccggagcagccggggcggagcgggaagaagagagggcgaaggaggccacaca

SEQ ID NO: 253444 - RNA, 80 nt, Homo sapiens
agcgaggccagccagaacgccggggaccaggcccgggcgccgcaaaaggaggagccaccgaggccacccgagcaacgcac

SEQ ID NO: 253445 - RNA, 67 nt, Homo sapiens
accgcagaggcgcaggaaggggaaaacacagaacgggagaaagcagaagaaggagaaccacaggaga

SEQ ID NO: 253446 - RNA, 58 nt, Homo sapiens
cgagcggaggaagcccccagggccaggacgcccggaccgacagaaagcgggacacaag

SEQ ID NO: 253447 - RNA, 77 nt, Homo sapiens
gaaagaagccagcagcaaaagacgaacccaggagccgggggggcgagcccgccgagagcgccaaggaggagacaacg

SEQ ID NO: 253448 - RNA, 80 nt, Homo sapiens
gagcaaggaggaaggccaaggcggccaggacggagcagcacccgagggacaggcaggggacgggaaggacgccccaccac

SEQ ID NO: 253449 - RNA, 78 nt, Homo sapiens
ggagcggccggagaagcgggaggaggagggcgagagagcgaggagacgaagcaagcacccaaagccagcggcggggaa

SEQ ID NO: 253450 - RNA, 74 nt, Homo sapiens
caaaaagcaaacggaccagaccgaccaccaaaagagggccagacaaggggaacacaagaggagagaaggggacc

SEQ ID NO: 253451 - RNA, 76 nt, Homo sapiens
cgacgggggacaacaggacgaagagaacgcccgggaccgagcacccgccccgggcaccaacgggaccaacaacgga

SEQ ID NO: 253452 - RNA, 62 nt, Homo sapiens
gacccaagaaccaggggagaagaaggcggcccaggaggaaggcccgcccgcaggcaacaccg

SEQ ID NO: 253453 - RNA, 52 nt, Homo sapiens
gccacgcgcggaaggcagcgcccagcagcgcagcccgagaaaagcacagcac

SEQ ID NO: 253454 - RNA, 68 nt, Homo sapiens
cacggccccccccggcagggggggccgcggacgggaggaaagaaggaaaccagcaggccgaaagaacc

SEQ ID NO: 253455 - RNA, 81 nt, Homo sapiens
caagcaccagaggggacagaggcacacgggggcaggagagcggagggagccagacacagaggggagaccacaccacacagc

SEQ ID NO: 253456 - RNA, 68 nt, Homo sapiens
aggaaagcagaagcgcccgacccgccgggaacgccagcgagccagagacgccaccaacaaccccccca

SEQ ID NO: 253457 - RNA, 40 nt, Homo sapiens
ccgccaccggcacaccgaagggagaaggggaacgcgggcc

SEQ ID NO: 253458 - RNA, 81 nt, Homo sapiens
gggagaccacagcaagacgccaggacccacggaagccagaaagccaccaaaggacaggagaaaagaaagcaaccagccgag

SEQ ID NO: 253459 - RNA, 82 nt, Homo sapiens
gccaggccagacccgaaggccaggagacccgaccccaagaagaacggaccgaagccaaagaacaagagcgcagggacagagc

SEQ ID NO: 253460 - RNA, 83 nt, Homo sapiens
cagccgacccgcagagggcccgccggcggccgcggcccgcccagcacggacagccgaagaaccaggagcggcagaccgccgcc

SEQ ID NO: 253461 - RNA, 65 nt, Homo sapiens
acgcagggcgcccccgggcaaggccagagaaggcgggagaaagacacgaaccacagaacgcaaca

SEQ ID NO: 253462 - RNA, 79 nt, Homo sapiens
gcaccccccgagcccaaaaagaccaaagcacaagcaggagaggaaaagcaaagcacacaacagacacagagggacccac

SEQ ID NO: 253463 - RNA, 60 nt, Homo sapiens
acaaggggcacaagaagcggcaaaacgacgagaaggagagagagaacacgcccaggacgg

SEQ ID NO: 253464 - RNA, 83 nt, Homo sapiens
ccacgaggccagcacgggaacgcgaagcgccaaagccagacaagcaaaagcagaccggaaaacccaccggcaagaccacaccc

SEQ ID NO: 253465 - RNA, 69 nt, Homo sapiens
cagaccgcaggaggcaagggaagacagcagaacccggaaaggacgagaccgcacacaccgaggggagag

SEQ ID NO: 253466 - RNA, 85 nt, Homo sapiens
cggcgagcagggagcggagaccagcaccaccagcaggcacagcccaaacagcaaagaggccgaaggcccacaagagaccggcaga

SEQ ID NO: 253467 - RNA, 75 nt, Homo sapiens
aaaggaagaagcggggcgaccgagggcgcagaacacacaaaggaagagagaagggcacagaccaagacaacgaac

SEQ ID NO: 253468 - RNA, 77 nt, Homo sapiens
ggccacggaggcaccagaagaagcaccaggcacgcgaaaccaagagaaagaagacgacacacagcaagagaagggca

SEQ ID NO: 253469 - RNA, 85 nt, Homo sapiens
ccgccgcccccaggccgcccgcccacagccagcaagagaggcaagcaaccccggggaagaggccaggcagccacgacaacaagac

SEQ ID NO: 253470 - RNA, 60 nt, Homo sapiens
gaacgggcgcggaacacgcaccgggacaggcccaggacgacccggcccgccagaacccaa

SEQ ID NO: 253471 - RNA, 73 nt, Homo sapiens
gacaaagaccgaaaagaagagaacaaagaagaggcgggcggagggcacaccagaggggaaccaaggacggggc

SEQ ID NO: 253472 - RNA, 79 nt, Homo sapiens
cggaacagaacaacccagaacggaagccccccggaaaaggagcccccaggacaggcacacccgggaaaaccgaacaccc

SEQ ID NO: 253473 - RNA, 65 nt, Homo sapiens
cccccccaacaggcggcccagaaagcaagccagcaccaggggcagggcgcgggcaggagagcccg

SEQ ID NO: 253474 - RNA, 78 nt, Homo sapiens
agaaaaagagaggagggagaacacagaaacccgccccggggagaggccaccccgaaacggaaagaagaaagcgaagca

SEQ ID NO: 253475 - RNA, 76 nt, Homo sapiens
gagagaagaaaacaggagccccagcgccaccgccgaccgaagccgcaaaagcccgaaaccggcagagcgacgggag

SEQ ID NO: 253476 - RNA, 84 nt, Homo sapiens
acggcaacccacaaggccaagcacccccgcaccagccacacaccaggagacggcgaagaacagaggaacaacgccaacgacaag

SEQ ID NO: 253477 - RNA, 82 nt, Homo sapiens
cggaaggagaagaggccgccgcgccaacgcgagcggcgacggcggaaagcgaaggccaagcaaggcaaggggagagcaacgg

SEQ ID NO: 253478 - RNA, 58 nt, Homo sapiens
ggaaaagcagacgagacaacgaccacggcacagaacgagacgaggaagggcgccccaa

SEQ ID NO: 253479 - RNA, 85 nt, Homo sapiens
gccagacacggcaggccaagaagcaccgagcgacacaaccagagggaagcacgcccgggcacagcggaagagacgacggaacagc

SEQ ID NO: 253480 - RNA, 72 nt, Homo sapiens
cgaggaaagaagaccgcgagaacagaacggcacccccccgcgcgcgggggacagagaaagaagcaagaaaaa

SEQ ID NO: 253481 - RNA, 80 nt, Homo sapiens
cacgaggggccggcgagaggagcgggcgcacgggaggggaacgggccgaacgcagacacagacgcggccaaccacccaaa

SEQ ID NO: 253482 - RNA, 74 nt, Homo sapiens
gaagggacgggacgaggacccggggaagacaggagaaagcaggggaccgggcccgccaacaaaggaagaggaaa

SEQ ID NO: 253483 - RNA, 75 nt, Homo sapiens
gcaccagcggagagaagaccccaggggcgacaggccgcagcacacaaagcagagggagaaccagaagagaaaaca

SEQ ID NO: 253484 - RNA, 77 nt, Homo sapiens
agccaacaccgaaaaaggcacggaagggaaacaaggcccgcagaccaaaaggaacggcacggagacaagggagccac

SEQ ID NO: 253485 - RNA, 85 nt, Homo sapiens
gaagcacacaagggccgaagcagggcacaaaaccaaggccaagcaaggggacagagagaggcagaagaaaaagcacccccaagcg

SEQ ID NO: 253486 - RNA, 58 nt, Homo sapiens
agaacagaacagaacaaagagaagcggcaggaaagcggaggagacagcaaggaagaag

SEQ ID NO: 253487 - RNA, 77 nt, Homo sapiens
ccgcacaacaagaggccggcggggcgacagcgggaaggcaaagaagaagcgcccacagaaggaagcgcgggaaagag

SEQ ID NO: 253488 - RNA, 34 nt, Homo sapiens
acaggggcccaacaggagagggggaaccagcccg

SEQ ID NO: 253489 - RNA, 78 nt, Homo sapiens
cagcacgccccaggcccaccgccggggcgccaaggccgggagcagggcgggacccgagagaacgcaagacccaccccc

SEQ ID NO: 253490 - RNA, 69 nt, Homo sapiens
ggggaccccggagcccagaagacagagggcgaggcgccagccggaagcccgagggcagcgcccacggcc

SEQ ID NO: 253491 - RNA, 67 nt, Homo sapiens
aacgggaaagaacagagaaggaagagagaaggccacgcccgaccccaagcaacaacggggcagggac

SEQ ID NO: 253492 - RNA, 59 nt, Homo sapiens
gggccagcacaccaagcgcagccccagggcacacgcccccagggacgcggagggggaca

SEQ ID NO: 253493 - RNA, 75 nt, Homo sapiens
aaaggagccggaaacggacaaacaggcgacaaacgggccacaaagcacggaacgaaaacgagggaccacacaaag

SEQ ID NO: 253494 - RNA, 74 nt, Homo sapiens
acggaaaccacgcgccacacaaagagccgcgggggcgggacacaaggacaccaggcaccggcacggaccacccc

SEQ ID NO: 253495 - RNA, 113 nt, Homo sapiens
agagggagcaccacggaccccaaggaagccacggcagacacacaacccgacccgacgaggaagggacgcaaaaaggaagccccacaaggaccaggcaaaacggaagagcacaa

SEQ ID NO: 253496 - RNA, 64 nt, Homo sapiens
ccggccgcccccagcggggagcacgcgccaaaggagacaaacaagaagcgaccccgcaacaggc

SEQ ID NO: 253497 - RNA, 49 nt, Homo sapiens
gggagcggcgaagccgcgggcgagaaaagaaacgaagccgggcacggac

SEQ ID NO: 253498 - RNA, 80 nt, Homo sapiens
cagcaagagagagacaagcccgaggccgaccagcacccgaggagcccagagcagggaaccaggggaaacaggccagccac

SEQ ID NO: 253499 - RNA, 73 nt, Homo sapiens
cagcacggggcagacaccgcccgaacacacaccgacaacagacagcgacgagaaggccacgagggacaacccg

SEQ ID NO: 253500 - RNA, 79 nt, Homo sapiens
ggaaacaccaggcgcggcggcccagccccgacacagagagaggcccagcgcaaagaagaggggccaagagaaaggaacc

SEQ ID NO: 253501 - RNA, 74 nt, Homo sapiens
ccggcgaacacggaagggaaagcacagcccacgggcagggcaccgggcgagccccgcggccagcgccccaccgg

SEQ ID NO: 253502 - RNA, 81 nt, Homo sapiens
gaacaaggagccggagcggggcaaaggagccgggggggcgagcccgccgagagcgccaaggaggagacaacgggggaagaa

SEQ ID NO: 253503 - RNA, 89 nt, Homo sapiens
ggcggcgcagggcggcggcacaaacggcggcgccggggccggaggaaaaagccgagccaggacaaaaccaggcagaaccaacacgaacc

SEQ ID NO: 253504 - RNA, 34 nt, Homo sapiens
ccgaggaaacggcagcggggacggaaagagagcc

SEQ ID NO: 253505 - RNA, 106 nt, Homo sapiens
accgccgcagcggcgcagcccacgccagacgaccccacccgcgccgcgacccgggagcaccgcggacgccccagggcacaccgcgcaccagcgagaggaggagaac

SEQ ID NO: 253506 - RNA, 57 nt, Homo sapiens
cgcgccggcccagcaccccgagaaccgcaggagccagagccaaccaggaaacgggaa

SEQ ID NO: 253507 - RNA, 70 nt, Homo sapiens
aaagccgcccagacggccaccggcgggaggaacaaaagagacggcaggaccaacggggcaggaggcggga

SEQ ID NO: 253508 - RNA, 61 nt, Homo sapiens
cccgcaggcgaccgaagacaggggggcaccaaacaaccacagaagccagaagcccaggccc

SEQ ID NO: 253509 - RNA, 74 nt, Homo sapiens
cgacgacaagcaggagcgagcaggccaaaagggaccggcaacggagaaccgaccagcccaaaaccaggcccaag

SEQ ID NO: 253510 - RNA, 75 nt, Homo sapiens
ccggcggagcagaggaaccacacgcgacaggacccgaacacggaagaaagacacgcaggaggccgcggccgagca

SEQ ID NO: 253511 - RNA, 77 nt, Homo sapiens
ccaaagaaaacaagagggccagaggaggacagcacacaagggaggcgaggacggacaaaaggaaacggacgggaggc

SEQ ID NO: 253512 - RNA, 65 nt, Homo sapiens
aaaaacggacagcgaggcaaaaagacgcggggagcagaaggagacaggaacgcaaacaggaagaa

SEQ ID NO: 253513 - RNA, 101 nt, Homo sapiens
ggccccggcgggggcgcgggcggcgggcagcccgcgggcgcccaggacaacccccaagaaagggagcccagaacgaaacaacccagcagagacccacaaac

SEQ ID NO: 253514 - RNA, 77 nt, Homo sapiens
cccgcgcggcgcggggaccgcggcccgcaccggccacacacaggacaagagcgaagccacacgcgggacgacgccac

SEQ ID NO: 253515 - RNA, 81 nt, Homo sapiens
gcgaagcggccaaagccgcccagacggccaccggcgggaggaacaaaagaccgccaccaggaagaaagagacaaagacgaa

SEQ ID NO: 253516 - RNA, 36 nt, Homo sapiens
gcgaaaaagaggagagcgcagagaagagagaacaag

SEQ ID NO: 253517 - RNA, 78 nt, Homo sapiens
ggcggagaagaagcgcggccgcaccggccaagaccaagggaacggaagccccagcccgcgcgagccaggcgcccacag

SEQ ID NO: 253518 - RNA, 72 nt, Homo sapiens
aaggagagacgcgcgaggggcgccgaagcgagggacgccgggaacccgaagaaccccaagcgcgaggaaaaa

SEQ ID NO: 253519 - RNA, 70 nt, Homo sapiens
aaagaaaacccacccgacccggaagccacaggcggccacaggccaggaaagggacaccccaggcggggga

SEQ ID NO: 253520 - RNA, 54 nt, Homo sapiens
gaaaacaagggaaaggcgcccggaagggggagcaacagacaagcccgaaaggaa

SEQ ID NO: 253521 - RNA, 46 nt, Homo sapiens
caaccgaccgacggcagggccagagggaaaagaggacgaggcgcga

SEQ ID NO: 253522 - RNA, 69 nt, Homo sapiens
aagaccagaggagaaaacagacccacagcgacaccccagaaagagaccagcccaggcccacaggggccc

SEQ ID NO: 253523 - RNA, 80 nt, Homo sapiens
gcagcagggggcgcacaacggcaagacccaaccaggggagacaagaccaccaacaccggccccgcgaagcacgccagccc

SEQ ID NO: 253524 - RNA, 55 nt, Homo sapiens
gaagcaaccagaaggacaaggcggcgccggggcagggcaccaacaccagcgggca

SEQ ID NO: 253525 - RNA, 83 nt, Homo sapiens
gcaggacagcaagcccagggcgccggacggaccccaggggcagagacgccacagggaccagccacgggccagggcgcggaggg

SEQ ID NO: 253526 - RNA, 82 nt, Homo sapiens
cccaggacgacagggaggcgaagaccccagccagaccggaaacgacccaccccagggcaggggcaagaaagaaaaggcaacc

SEQ ID NO: 253527 - RNA, 56 nt, Homo sapiens
ggaaacagaaaagcccggaaaaaaggacccgaaaacagaacagcagaaccaggcgg

SEQ ID NO: 253528 - RNA, 59 nt, Homo sapiens
gcacccagaggccggggaccgccaaccccccaagaagcagagggacagacaaacagcgg

SEQ ID NO: 253529 - RNA, 37 nt, Homo sapiens
accaggccccccgcggcaaagggccccggaagaggaa

SEQ ID NO: 253530 - RNA, 77 nt, Homo sapiens
aggaaggaggcaaagaaccccgacccagcagcaaggccagcaaccgcacagaaaccaagaggagcagcaagacggga

SEQ ID NO: 253531 - RNA, 75 nt, Homo sapiens
ggaacacggaccgaaccagagcggggcaaacgcggcaccccaaagggacacaagaaccaacagagaaaagccaga

SEQ ID NO: 253532 - RNA, 80 nt, Homo sapiens
ggccagagccaggggccgggagggcgccagcccagaaaacagaaggacaaaagagaacaaccgggccagaaccacccaaa

SEQ ID NO: 253533 - RNA, 82 nt, Homo sapiens
cgcgccgcgcggcggcccgccagaaggaggggaaagccagcgcagcgcgagaagcgacagcgaagaagaagcgccgaccccc

SEQ ID NO: 253534 - RNA, 71 nt, Homo sapiens
aagaagaccaaaagaaaaggacgaacagagggacccacacagcagaaaccacaccaggaggacggcacagc

SEQ ID NO: 253535 - RNA, 73 nt, Homo sapiens
gaaggaggcgggagcggagacccgcgcgccaggcgcgcccggaggcacacccagaagccacaggagaagcaag

SEQ ID NO: 253536 - RNA, 75 nt, Homo sapiens
gcgaacagaaagccgccgagggagccgagaggaacaaagcagcaccagagccggggaaaaaaacacaaggaccaa

SEQ ID NO: 253537 - RNA, 101 nt, Homo sapiens
ccgggcgcgcaccgccgcccccccagacaagaggacaccgcggaggaagagggaggaaccgaaaggaaaccgaggacacagaaaagggcacagcaaagcag

SEQ ID NO: 253538 - RNA, 94 nt, Homo sapiens
gaacgacgcgacaccgggaaagcccagcgggacaagcgacccagaaaaaggcacaaacccagcacagagaagacggcgacaagcaaaagacgac

SEQ ID NO: 253539 - RNA, 78 nt, Homo sapiens
gcgccaagggaggaggaagaggcggcgggggcgaggcggcccaaccgggggaggaaacaaaacccacgaagcaagcga

SEQ ID NO: 253540 - RNA, 76 nt, Homo sapiens
acaaccccagcggcccaagaaacaaaaaaaggaaacacacaaacgcaggaaacccgggaaagcaaaagcgaaggga

SEQ ID NO: 253541 - RNA, 69 nt, Homo sapiens
aaaaagaaaacgcgcgagaagagagacgagagagaagaggagagagaagaggaacaagaggacccccaa

SEQ ID NO: 253542 - RNA, 75 nt, Homo sapiens
cccgcgggccgggacgccgccgccgcggccgaggggaacagaggagcagcggcagaaaaagggccagacgaggcg

SEQ ID NO: 253543 - RNA, 94 nt, Homo sapiens
gccaagaccaggaaaggaaggcaccccccgaccagcagagggaccggagacagcagcagaagcagaaaaaggcaaacgagaagaaggaggaacc

SEQ ID NO: 253544 - RNA, 80 nt, Homo sapiens
gacggcgcggcagagccccgacgccacagaacgggggggccccagcccggccgaacgggcgcacgacacaaacacaaccg

SEQ ID NO: 253545 - RNA, 68 nt, Homo sapiens
aaaacaagagggccaggaaacgcagcagaggcagaacggaagggacacagaagagccagaggccaaga

SEQ ID NO: 253546 - RNA, 108 nt, Homo sapiens
ggccggagaagaagcggccgggcccaggcgggaacacacacaacccaggagccgacaggaggcccaggcacaaggagagaagaagacaaggaaccacagcggaaacag

SEQ ID NO: 253547 - RNA, 101 nt, Homo sapiens
ccacgggaacaaaccaaaagcaaccggcaaacacggaagccaaggacagaagcggaggggcgccaaccaaacaaccaaagcgcaaacagcaaggagaacag

SEQ ID NO: 253548 - RNA, 81 nt, Homo sapiens
gagacgagaagccgaaaagcgcagcgagcggagccgccggaggcccagaaggggaagacccccagcgaacagagacccaaa

SEQ ID NO: 253549 - RNA, 66 nt, Homo sapiens
cacccaaggacgcgccgacagaagagagccccgcgacaagagaagcaccagaagacgcagggcgcc

SEQ ID NO: 253550 - RNA, 82 nt, Homo sapiens
aagcgggcccgggcggaccgggcgccgaagcccgaggcagaggaaccggccccagaaacagcgcgaacgaagaacagacacg

SEQ ID NO: 253551 - RNA, 66 nt, Homo sapiens
ggacggcgccggcagccgaagacagggagagagcccgcccagaaccacccccaaacagggaaacga

SEQ ID NO: 253552 - RNA, 66 nt, Homo sapiens
acggacagaaccccacccacaagagcagcacaaaaccagagagacacacagaggacagaccccccg

SEQ ID NO: 253553 - RNA, 71 nt, Homo sapiens
ccaaacagcacccggcaagaagaacacagggggaagccaagcagaacaaagcccaaaagcaaagcagggca

SEQ ID NO: 253554 - RNA, 81 nt, Homo sapiens
ccgacccacccggcggaggaacggggcccgcccgcggcccccgcgcggaggacaccagaaccaccgggaggcgaaaagaga

SEQ ID NO: 253555 - RNA, 55 nt, Homo sapiens
gaccacagaccaacccccggcagggagaaggaggaggggccgcaaggccaggcgc

SEQ ID NO: 253556 - RNA, 69 nt, Homo sapiens
gcagcaacgcagcggagaagagagggcaggcacgagcaaggaggagccccgaaaagcaaagaaaaagga

SEQ ID NO: 253557 - RNA, 109 nt, Homo sapiens
gggaacgacgcggcgcgcgcggacgaagagccccccccccaacaccgcgacacgcagggaagaagcccagcggaggcgaacggcccccgccaacacgaggaccccacgg

SEQ ID NO: 253558 - RNA, 71 nt, Homo sapiens
acaacacccgggcagcgcaagacagcggagagaacccccgcagaaggacacaccaggccacaaccaaagac

SEQ ID NO: 253559 - RNA, 49 nt, Homo sapiens
agcccccagagcggaacacaggacgccgccagccaccggcgcgaagcca

SEQ ID NO: 253560 - RNA, 84 nt, Homo sapiens
caaacaccgcagccaccaagaaaggccacagaaagccgccagcgagaagagagcccacgccagcccagaagaaagacgcaacga

SEQ ID NO: 253561 - RNA, 75 nt, Homo sapiens
gccagccccagacacgggcgacacgaacaacaagcagaggaccaaagaaaacgacagaagcacgacaacaacggg

SEQ ID NO: 253562 - RNA, 38 nt, Homo sapiens
aagagccacagcagcagaggaccaggcccgcagagacg

SEQ ID NO: 253563 - RNA, 76 nt, Homo sapiens
aacgaaccccggggagagcagaacagaaacgggaggaggcacgagaccaggacgaggagaaaagaagaaacgaagc

SEQ ID NO: 253564 - RNA, 80 nt, Homo sapiens
gggaggagccgccagccaccggggccgccgcgccgccggacgacaccccacagcaaaagagccgcagacgcacagcaacc

SEQ ID NO: 253565 - RNA, 64 nt, Homo sapiens
cagggagagaaaagaagagccacccaagggaggggaccccaccacgccgggacaccaccccagc

SEQ ID NO: 253566 - RNA, 73 nt, Homo sapiens
ccgggccgggcgacgcgcagccccggcgccccggggcccccgggcgagcaaacagcggagaaccacggggcag

SEQ ID NO: 253567 - RNA, 68 nt, Homo sapiens
cgcgcccggcggggagcgcagcgcgacgcccaggccgccaggcaccggaacacgaccccgcacaccgc

SEQ ID NO: 253568 - RNA, 74 nt, Homo sapiens
cgagcggaggccaacaaagaaagagaaaggagaccacaagaccccgcgccaccaaagggagggcggccaaccgc

SEQ ID NO: 253569 - RNA, 49 nt, Homo sapiens
gggcgggacacaaaccaccacgaaaaccggggaagaagggagggccaga

SEQ ID NO: 253570 - RNA, 76 nt, Homo sapiens
gggagaccggccgggaacagacggggcggagaacggaaaagcaccaggaagcagagaggaccgcagaagggaagga

SEQ ID NO: 253571 - RNA, 63 nt, Homo sapiens
ccaccacccaacacacgaaagaggacaagcagccggcggaagaggaccaagaagggggcagcg

SEQ ID NO: 253572 - RNA, 68 nt, Homo sapiens
caccaccagcccagccacacagacggggacagaagcgacaggagaacggcggccccgagccaaggaaa

SEQ ID NO: 253573 - RNA, 76 nt, Homo sapiens
acgagagacgaaccagacagggcagagacagcggacgacggccacagacggaagaccaggccgaagcaaacacaca

SEQ ID NO: 253574 - RNA, 84 nt, Homo sapiens
ccccacagaccagcccagcacagggccgggggccccgaaggcagccggagccggagcccacccacacccaccaggcccgaggaa

SEQ ID NO: 253575 - RNA, 53 nt, Homo sapiens
cggcccaccacggaggagccccccacacgcgcgcgggaacccgcaccaccccg

SEQ ID NO: 253576 - RNA, 73 nt, Homo sapiens
aaagggcaggcaaaacaaagaaccacagaacggacaacaaaacaacccggaacaggcgggcgcaaagacaccg

SEQ ID NO: 253577 - RNA, 77 nt, Homo sapiens
ccaccccgggaacggagacaaccaaggccggggggggcacagagccccggaagacagcccccagcgaccagacccag

SEQ ID NO: 253578 - RNA, 73 nt, Homo sapiens
ggggaagaagcccacgcacaggaaggcggccccgcagcagaggcgagccgccaggggaagggggcaacgcagc

SEQ ID NO: 253579 - RNA, 69 nt, Homo sapiens
cccgcaccaagacgccggacggcagaccagcgccagggaacacaagccgagaacagccgagcccagccc

SEQ ID NO: 253580 - RNA, 55 nt, Homo sapiens
cccaccggcccacccacaagcgcacaggaccggggcggagaacggaaaagcacca

SEQ ID NO: 253581 - RNA, 76 nt, Homo sapiens
ccgaacgccgccggaccccgggaggcgaggacggccgccagaaaagcaggacgcgggacggccgcacaagcgcaga

SEQ ID NO: 253582 - RNA, 75 nt, Homo sapiens
accacgagcacggcccgcgcacgcccggagagagggacccccccgcggcaggaacgcacccggcggccccacgca

SEQ ID NO: 253583 - RNA, 73 nt, Homo sapiens
agaaacagcagaaacgcaccaggccaaagaaagagaagcggcaaggaagaggcccggaaagggaaaaaccgag

SEQ ID NO: 253584 - RNA, 57 nt, Homo sapiens
ccaccaaaacaagaaaacaggccagggaagacagaaggaagcaaagacagagcaaaa

SEQ ID NO: 253585 - RNA, 55 nt, Homo sapiens
gcggagccaggggacaggagcgggggcgaaaaccacacaccaaggaaggaccgcc

SEQ ID NO: 253586 - RNA, 34 nt, Homo sapiens
gagccgcggggaaaggagcggggacgagagcccc

SEQ ID NO: 253587 - RNA, 67 nt, Homo sapiens
ggggaccccggagcccagaagacagagggcgagggaaacccagacgacaaggaaggccaagggaccc

SEQ ID NO: 253588 - RNA, 40 nt, Homo sapiens
ccccacgaaggcggcaccaagagcggagagaagaaggaaa

SEQ ID NO: 253589 - RNA, 53 nt, Homo sapiens
gaccgcgcaagccccagacgagagccggggccggacgagaaagccgaaggaga

SEQ ID NO: 253590 - RNA, 61 nt, Homo sapiens
gcccagcccccgagggcgggacacaggcaagaaacagccagcgggggcggcaccggccccg

SEQ ID NO: 253591 - RNA, 32 nt, Homo sapiens
caagcagaaagagaaagaacacgaaagaaccc

SEQ ID NO: 253592 - RNA, 73 nt, Homo sapiens
gaggagaacaaagcaaaaccagaacgcaagagagccaagaaaagggcaaaacacagggggaaaacaggcgagg

SEQ ID NO: 253593 - RNA, 72 nt, Homo sapiens
ccggccgcgacagcgaacagcgcggccgcaggcacggggccaaaaaggcacgagggaacgggaaagaacaga

SEQ ID NO: 253594 - RNA, 79 nt, Homo sapiens
ccccccggacgacggggcgggaccggcgccaccgcagacagaccacgaacacggacggggaggcgggaaggggaagaca

SEQ ID NO: 253595 - RNA, 73 nt, Homo sapiens
cgcaccaggccaccgccacgggccgagacacgcagcggcggccagggaccaaggggaaagaaccagacgacag

SEQ ID NO: 253596 - RNA, 80 nt, Homo sapiens
ccaccgaagacaagcgcgcggcggcccgggcagggcgaggacacagggaagcaggcaccggcacggaccaccccaacacc

SEQ ID NO: 253597 - RNA, 60 nt, Homo sapiens
aaaaaacaacagcagagcaaggaaagccagacaccgagagccgccgggacacagaccccc

SEQ ID NO: 253598 - RNA, 61 nt, Homo sapiens
cgcgcaccgcccagcgagccgggaaaggacaggcacagcaggccaacgcaggggggagacc

SEQ ID NO: 253599 - RNA, 83 nt, Homo sapiens
cgagcagcccccgcagggaagaaccggcccgcgggccggccccgccccagaccagcggcgccggagcaccggagcagaagacc

SEQ ID NO: 253600 - RNA, 74 nt, Homo sapiens
gccccacagaggaaggaagaagccgagcaggcaagaacggaagcacgggcggaggaaagcacaagcagagcccc

SEQ ID NO: 253601 - RNA, 54 nt, Homo sapiens
acccaacaccagccaagggaagagacccccagagaagcccgcagggacggggaa

SEQ ID NO: 253602 - RNA, 63 nt, Homo sapiens
aaggaacgaagagagcccagagcagagaggcaaacaaaaaacaccaggaccccagggccaaaa

SEQ ID NO: 253603 - RNA, 71 nt, Homo sapiens
cagaagggaaaccagaagagcaaggcggcaggcagacccaggaaaagcgcaagcaacacagaggaaaaacc

SEQ ID NO: 253604 - RNA, 79 nt, Homo sapiens
caagaccagacgggaacgggagacaagcgcagcgaggggaggggcgaccccggggcccggccagcacgaccgaggaggg

SEQ ID NO: 253605 - RNA, 79 nt, Homo sapiens
cccggaggcccaggcccaggcggcggcaccagacccggaggagcagcaccccggcaggcagaccagccggcccccacca

SEQ ID NO: 253606 - RNA, 76 nt, Homo sapiens
ccgacaggcggcgcgggcggcgggacaaaggccagaagcaggagagcacagacacaaagaccaaagccgagcaaaa

SEQ ID NO: 253607 - RNA, 64 nt, Homo sapiens
gggcccgccgggcgaagccgaacagccaacagcaggcaggggcgcacccagggacccagagggg

SEQ ID NO: 253608 - RNA, 75 nt, Homo sapiens
ggaccgccgacaccggagagagggcccagccagaccgaaggccaacaaagcgaagagacgacgggaggaaagcaa

SEQ ID NO: 253609 - RNA, 57 nt, Homo sapiens
accaggccagagccagaacagaaaccccccggagccccaaagccaggacagcccagc

SEQ ID NO: 253610 - RNA, 84 nt, Homo sapiens
caagcccggccgggcaggggaccccgacccaggacggaccggaaggcccagaaccaaggcgccggaccgaaggcgcgaccacga

SEQ ID NO: 253611 - RNA, 70 nt, Homo sapiens
gacccggcaccacacgcagaacgggcggacgggcgcccagccaggccgggcccaagaagcacgaagcggg

SEQ ID NO: 253612 - RNA, 77 nt, Homo sapiens
ggaacccaccacgccagcacagaagccacaagcaaaacaaaccagcggaaggagaaacaaggaagagcaacgcgcga

SEQ ID NO: 253613 - RNA, 80 nt, Homo sapiens
aaccagaaaacacggaacaaagcagaagggaaggaggagaaggcggggaggaaagcggaccacacaaccacaggaggaga

SEQ ID NO: 253614 - RNA, 50 nt, Homo sapiens
gccgggaagaaacaccaggcccagcaggcgcagcagcaagagggaaaaag

SEQ ID NO: 253615 - RNA, 76 nt, Homo sapiens
ggcccgaccggccgcgacagcgaacagcgcggccgcagggaaccaggagccgacaacaacccgacgcaaggcagcc

SEQ ID NO: 253616 - RNA, 90 nt, Homo sapiens
ccgcgccaagccagagcagagcaccggccagaacaagccaaggagccaagacgagagggacacacggacaaacaacagacagaagacgac

SEQ ID NO: 253617 - RNA, 76 nt, Homo sapiens
agcaccgacgcccccgccccaggaaaggaagccaaaggccggaaaaaccaacgggagccgcaaggacaacagccgc

SEQ ID NO: 253618 - RNA, 68 nt, Homo sapiens
aaacaccagagagcggccaacaaaagcaccaccaagggagcacaagcgggaggggccggcgaagcgaa

SEQ ID NO: 253619 - RNA, 68 nt, Homo sapiens
ccaagacagcccagggaacccaggacaggccccagacgggaggaacgaagcgccgcaagagaggaggg

SEQ ID NO: 253620 - RNA, 77 nt, Homo sapiens
gaggaggccgacacaggaagacgcccagaagcaagcgggaaccggaaagaaagagacgaggcaggaggaagaagacc

SEQ ID NO: 253621 - RNA, 44 nt, Homo sapiens
agcgcgaggcagcggcacaggggaggggaggaagcgcccgggac

SEQ ID NO: 253622 - RNA, 80 nt, Homo sapiens
cggagcgcggggcgaaagggagaaggcgcagcgcaacagggcggaaggcgcgcaagagcaggggcaaggaggacgacccg

SEQ ID NO: 253623 - RNA, 84 nt, Homo sapiens
gaggggcgccggaggacaccacaggcgacaagccaggccgcgagaagcagcccagggccagagccggcgacacacacagcagca

SEQ ID NO: 253624 - RNA, 65 nt, Homo sapiens
gaaagagagaaaccgcagggaccgacagcaagaaaaggagaaaacaaggccgcgggcacacagca

SEQ ID NO: 253625 - RNA, 74 nt, Homo sapiens
cgcagcaggaagcggggcggaccaggaacggcggaaggccaaaaccacaacagcagcaggcgccagcacccccc

SEQ ID NO: 253626 - RNA, 39 nt, Homo sapiens
accgacgagcccgggagcccacagaggaacacaaaaaac

SEQ ID NO: 253627 - RNA, 99 nt, Homo sapiens
gaacgcggagcggacggacgacaacggggccggaccgcgcgcgcaggagcaggccccccccgacaggagagaaccgcggccgggccgcgccgggcgggc

SEQ ID NO: 253628 - RNA, 80 nt, Homo sapiens
cgcacccccgcgccgcacggggacgaggaacacagacaaccagggacacaccccgccaggcaggaagcaggaggacgaaa

SEQ ID NO: 253629 - RNA, 75 nt, Homo sapiens
cagcaaggaccggaagcagagaaaaaagccaggcccaccagcagaaagcgcagaaccggccgaaaagcacaaaca

SEQ ID NO: 253630 - RNA, 71 nt, Homo sapiens
gccccggggacacgcacaggccagcgcaacggaaacagaaaagagcgggaaccagccaacagaaacaacac

SEQ ID NO: 253631 - RNA, 78 nt, Homo sapiens
cccgagagcgggaccaaggcccccgcaccacgccagcgacccgagggagaaagaccaaccagaaagcgccgaagaccg

SEQ ID NO: 253632 - RNA, 69 nt, Homo sapiens
ggccaaagagcggaaaggcaaaaggacagacaagaggaaaagggagaaccaacaaagagggcaccacga

SEQ ID NO: 253633 - RNA, 55 nt, Homo sapiens
aaccgagacccgagaccagaaacacacagaccaaagcgcacgggaggccgagggg

SEQ ID NO: 253634 - RNA, 69 nt, Homo sapiens
cccggcacagagagcaaggggaaacacaccagcacacaaaggaaggacagcgacaaaaggggggagaaa

SEQ ID NO: 253635 - RNA, 67 nt, Homo sapiens
cgcgggacgggggaccaggcccgggcgggggaggcagagggcgcaagggaacacaaccccaccgagc

SEQ ID NO: 253636 - RNA, 81 nt, Homo sapiens
ccacgcaagggcgaggcagccccaaacaccggggaggccacccgaagaaaggcgcagcggaaccacggccaacccgcccgc

SEQ ID NO: 253637 - RNA, 84 nt, Homo sapiens
aacgacacaagggaagacgcggaggacagcggcacggcaggcacaacagaacaaggagaggcccgaaccccaagaagaaagggc

SEQ ID NO: 253638 - RNA, 77 nt, Homo sapiens
accaagaaccagcaggcaggcccggagagccgcacgcgcggaaaggcccgcccaccaccggagcccagcgcgcccgc

SEQ ID NO: 253639 - RNA, 76 nt, Homo sapiens
gccccagcccccggagccgcaacaggagccggcaccacagacgacagaccaaggagcagcgcacaccggagggggg

SEQ ID NO: 253640 - RNA, 58 nt, Homo sapiens
cggggccgacccaagggaaaccaagggaacgaaaacaaacggaagagagggcagcaag

SEQ ID NO: 253641 - RNA, 88 nt, Homo sapiens
cgcgaaaggggccagaggcgcgacaccacccggccgggagcccgacgaaagccaagcacacgcaaggaagagggccgccgaagaggag

SEQ ID NO: 253642 - RNA, 70 nt, Homo sapiens
acacgggacaacccccacagaagggagacagggagaccaccaaaaagaaccccaaagaggcccggaggaa

SEQ ID NO: 253643 - RNA, 83 nt, Homo sapiens
gcgagcagaggagcgaggcgccgcccgccgccacaaagcaaaccggcacgagccaggcaccagaaccagaacaccaccaggag

SEQ ID NO: 253644 - RNA, 39 nt, Homo sapiens
caaggcaaacagacggcaggaggcgcagaagaaacagga

SEQ ID NO: 253645 - RNA, 75 nt, Homo sapiens
agcaagcggcacccacagccggagggaaacgaacacaggagaaccagaccgaggccaaaagaaaggaagaaaacc

SEQ ID NO: 253646 - RNA, 75 nt, Homo sapiens
ggcggcgcggccggcagccggcagcgcagcgggccacgacaagagacagcgggccggaaagggcacaggcacaaa

SEQ ID NO: 253647 - RNA, 85 nt, Homo sapiens
aaggaagagcagagacgccacagcagcaacacggaaacaccaccgaaagggaagaagagggcgggcgggccggccaggacggccc

SEQ ID NO: 253648 - RNA, 84 nt, Homo sapiens
gaaaacgcaaaggaaggacagacccacccacacagaggcccgaaagcagaacagagaaggaacgaaaagaaaaaaaaaggaagc

SEQ ID NO: 253649 - RNA, 109 nt, Homo sapiens
gcagcggcgcagcgcccgccgcggcccgggcccccccgccggaaacagaccccaagaagaagcggaagaggagccgcggaaccaagacacaaggaacagaagacaggac

SEQ ID NO: 253650 - RNA, 84 nt, Homo sapiens
gacaagagaaggaccgaacaccaaaaaagacgccaaacgcgaaagggagaaagaagaacgcccggaggcggacaaaggcgcaac

SEQ ID NO: 253651 - RNA, 79 nt, Homo sapiens
ccacgagcaccgcgccggcccagcaccccgagaaccgcaggagccagaggaaccacggaaggagggggcgacacacaag

SEQ ID NO: 253652 - RNA, 83 nt, Homo sapiens
cccagagaggaggcacagaaggacaggcgacacaacagggaagaccgggagaccagacaagaaaagaagcggagggggaggag

SEQ ID NO: 253653 - RNA, 51 nt, Homo sapiens
gcagacaagcagcagggacaagagaggggaggcaagcaggggggcaaagga

SEQ ID NO: 253654 - RNA, 81 nt, Homo sapiens
agaacgccaagccccaggcaaacccggaccccagccaggagaaaccgcaggcgggacaagaaaagaaaaagcaacagaaaa

SEQ ID NO: 253655 - RNA, 67 nt, Homo sapiens
ccagccgacgcccgcgccccccagcaaggaccgaaaagacgcggccccaaaggaaacacccgaagaa

SEQ ID NO: 253656 - RNA, 83 nt, Homo sapiens
cgagcccaggccgcgccgccacgaggcacacccacaagagaaagagcaaacccggacaaccagggaggcccgaccagaagaca

SEQ ID NO: 253657 - RNA, 81 nt, Homo sapiens
cgggggcaccgggcccagcagcagcaggaggagccaaggggagcagcgcgcgggagaacaggcagagaagcggaggagaac

SEQ ID NO: 253658 - RNA, 70 nt, Homo sapiens
ggcgggacagcaaaaagacccaccaaggaagcagcggccacgccaggccaggcgaacaaaaggcccaccc

SEQ ID NO: 253659 - RNA, 76 nt, Homo sapiens
cgagcagaccgagaagcaccgccgaggccgaacgacaagcacgggccgcggccgggaagggcgagcacgggccagc

SEQ ID NO: 253660 - RNA, 77 nt, Homo sapiens
aggccaggggagccgcacgcacacggcgccgcgcagcacccccaaaggcgcaggggacccaggcggaacaccccagc

SEQ ID NO: 253661 - RNA, 85 nt, Homo sapiens
cgcgcggggagcgcgccggaccaagcgggcccagaagcgggacacgaggaggggacggcccgccacaggcacagacgaggaggga

SEQ ID NO: 253662 - RNA, 75 nt, Homo sapiens
accccccaccgaggaagagcgggagaaagggagagcacaagccaacccgcccgaggccccccagaaggaccgaac

SEQ ID NO: 253663 - RNA, 83 nt, Homo sapiens
cccacccgcccccgcgggcgccgggccaggacggggaccggagggccggaagcgggccgggacaacgggcaggagccggaagg

SEQ ID NO: 253664 - RNA, 80 nt, Homo sapiens
ccgacggccggcgaccgacaagcagaccggaagaccgacggaagaccacaccccgagggagcccaggacaccacgagaag

SEQ ID NO: 253665 - RNA, 79 nt, Homo sapiens
agagagcgagaaagccacaccaccaaaacgaaacaaaggaccaaccaagccaccagacgaggaagacccggaaacaggg

SEQ ID NO: 253666 - RNA, 64 nt, Homo sapiens
gcaggcccggaagcgagccagagcgagcgcgaagacagcccacggagaagaacgcgcggcggca

SEQ ID NO: 253667 - RNA, 68 nt, Homo sapiens
ggaaaaccgggaagagcaagaacagggccacacgccaagcagcgcgcgagcggggaacgaccggcgcg

SEQ ID NO: 253668 - RNA, 74 nt, Homo sapiens
acagaccacagagaagcaggcgaccaggacaaccagagggaaaaaacaaaggcagcacggccgagacagagcga

SEQ ID NO: 253669 - RNA, 71 nt, Homo sapiens
gcgcagagcgacagagacaaccgcaaaagggacggcccaggggcaggagccggcggcccccaggcccaaca

SEQ ID NO: 253670 - RNA, 67 nt, Homo sapiens
ccagacccaagcgaggaagaaacagaaaagaccaagaccaccaaggcaaagagccgcgaagcagcca

SEQ ID NO: 253671 - RNA, 62 nt, Homo sapiens
cgaaacaaagcaagaacaccagcagccagaaggcccccccagggaagaaccacagcccgggg

SEQ ID NO: 253672 - RNA, 37 nt, Homo sapiens
cacacgccagcaaagccgcagggacacccgcggccag

SEQ ID NO: 253673 - RNA, 50 nt, Homo sapiens
cccagcagcccaggccgagacgaaaggcagcaccaggacaaaagaagggc

SEQ ID NO: 253674 - RNA, 70 nt, Homo sapiens
gcccagaggcccagggaggcaggggcagaaacagagaaggaacagcaaacacacagccggcagcggaacc

SEQ ID NO: 253675 - RNA, 74 nt, Homo sapiens
gccggcccagagggaggaaagaaagcagcaaacagccagaaccagcagccgcaggcccgaagaaagacacacag

SEQ ID NO: 253676 - RNA, 79 nt, Homo sapiens
ggacagcgggccgaaaaagacacacacacaccaccagagcaccccagcccgcgcagggacagagagaccgaagaggagc

SEQ ID NO: 253677 - RNA, 75 nt, Homo sapiens
gcaagggacagaggaggggagcaagcacgggcagcagccaccccacgggagacagaaacagaggcacagcaggcc

SEQ ID NO: 253678 - RNA, 59 nt, Homo sapiens
ccccaggacgacggaccggacacaccgcaccgagacaaccaagcaagggccagcagaaa

SEQ ID NO: 253679 - RNA, 67 nt, Homo sapiens
ggcaggaacgcacgaaaaggaaccaggcgccccaggagaaggaccgaagagacaccaagggagaaag

SEQ ID NO: 253680 - RNA, 74 nt, Homo sapiens
caccccagggagcggagcgacccggggcccagcgcgggccccgggccaccagggaccaccaccggggcccacgc

SEQ ID NO: 253681 - RNA, 75 nt, Homo sapiens
gacgggaacgacacacgcacgcccgcccgccacgacccccggggaaagaccaggagaaggcggggaggaagacga

SEQ ID NO: 253682 - RNA, 82 nt, Homo sapiens
aggggagagcggccgccgccgcgccgcccaccacagggagcgaagaggaaagaaagacccccgggacagaaacaagcccaag

SEQ ID NO: 253683 - RNA, 35 nt, Homo sapiens
cagagcagggagacaaggccccgacggcagcccac

SEQ ID NO: 253684 - RNA, 62 nt, Homo sapiens
gagccaccccacccagccgccacgccgggcagccggccacgggcaaccaggggacaggagcc

SEQ ID NO: 253685 - RNA, 52 nt, Homo sapiens
gacacacccaacccgggggcgaggcaggacacccgaaaggagcaccgcgccc

SEQ ID NO: 253686 - RNA, 77 nt, Homo sapiens
agaggaccggcgagggcacaggaggcggagcaagcggggagaaaccgacgcagaaaacagacacacagcggagacaa

SEQ ID NO: 253687 - RNA, 86 nt, Homo sapiens
cagaggcccccacggacgcaacggcaggacagcgaggggaacacagcccaacacagcgcacaggcaggaggacgaaaagcccagaa

SEQ ID NO: 253688 - RNA, 72 nt, Homo sapiens
aagcaacaccacacaccaaaaaagagcccaagagaacgaaagcacagaaaacaacgccccaggaccgcagag

SEQ ID NO: 253689 - RNA, 94 nt, Homo sapiens
cgcgccccggccgccaccgggagaagagagcggacccacaccagggaagacaggggagagggggcaccagcgggccacaagcacgagaggaagg

SEQ ID NO: 253690 - RNA, 79 nt, Homo sapiens
gacgagggcggcgcggcaccgcgaagagccccggcaagaggcccggaacagccaccagaagggccacagcaagaccaca

SEQ ID NO: 253691 - RNA, 63 nt, Homo sapiens
cgcccggcccgaggcccaggacagccaggcaccagcaccaagaacagagccgcgcgcccaggc

SEQ ID NO: 253692 - RNA, 79 nt, Homo sapiens
caagacccggcaccccagcaggccgcggacagagaagaggacgcggagacaagaggcccacgaggaccggagaagcgcg

SEQ ID NO: 253693 - RNA, 70 nt, Homo sapiens
gcagaaccacagaaacggggcccgaccggaaaagggccaagagcaggaacccggacccacaacggccaga

SEQ ID NO: 253694 - RNA, 66 nt, Homo sapiens
gcgccgcacccacggaaaaggagaccgaacgacgcggacaccgggacgaagccaagagagcggccg

SEQ ID NO: 253695 - RNA, 72 nt, Homo sapiens
acggaaaaggcgggaaagaagaaaagacgaagggaaaaaagcagagcccaggagaaaccggacgcgacgggg

SEQ ID NO: 253696 - RNA, 84 nt, Homo sapiens
caagaaagaacgaaaagcagcaacgagaagaagccaccaaggagcaggaaaacgggagggcagggcccagccaggaggagaagc

SEQ ID NO: 253697 - RNA, 76 nt, Homo sapiens
ccgggagacagcaaaacaagacacgacccagggggaaagccaccgaaaccaccgaagacaacagccaaaaccaaga

SEQ ID NO: 253698 - RNA, 67 nt, Homo sapiens
aggcggccggaaaccaaaccaacaaaaagaaggaaccaagggaaaggccccccgggcaagccagcac

SEQ ID NO: 253699 - RNA, 75 nt, Homo sapiens
agcacgaacagcaggccaaagaccagagggagaggcacgaaaacagcccacgagcccagccagggggagaggacg

SEQ ID NO: 253700 - RNA, 80 nt, Homo sapiens
gaggcccccgccgggccgggacccccccccgagggaggggggggaccccagaccggaaggccaaaacaagggaagcaaag

SEQ ID NO: 253701 - RNA, 123 nt, Homo sapiens
aggaggcaccacagcggcagcgacaagcaggcagcgggcgccagcaaaaccgaaacaggccacggaagggaacaccgccccccagagcacagcgggcccgcgaagggcgcacaagacccgaca

SEQ ID NO: 253702 - RNA, 77 nt, Homo sapiens
cagcaaccgcgacagagaggaccaccccgaaacccccggcggcgccggggcccgccgcagagagggccccgccagag

SEQ ID NO: 253703 - RNA, 64 nt, Homo sapiens
gggcgcacaccacggcccgggcacagacaaccgcagaaagaccagcccaagaaaacccagggca

SEQ ID NO: 253704 - RNA, 71 nt, Homo sapiens
acgaggacaggacagagcccccgaggccccagaacaccggcggaaaccccaggcacccgcggccccagaaa

SEQ ID NO: 253705 - RNA, 79 nt, Homo sapiens
gaacagacacggggaagcgcaaaaacaagacggggcgccccacagaggggcgacgcaagcacagcacaccgggagcaga

SEQ ID NO: 253706 - RNA, 71 nt, Homo sapiens
aagagagaaacaggcaaaagcggaacaagaaagcagccacaggaaaaggccgagacaggcaaccagacgga

SEQ ID NO: 253707 - RNA, 81 nt, Homo sapiens
gccaggcaagagagaggaaggaaaagggcagcggggcagaggccgaacacacccaggcaccaaacggccagcgggcacaac

SEQ ID NO: 253708 - RNA, 72 nt, Homo sapiens
caaaggcgcaggaaggccccagcagggcacggaccgaagagggcggaaccccaggaggaggggccaggaggc

SEQ ID NO: 253709 - RNA, 82 nt, Homo sapiens
gccaccccacgccaccagaacccaagagcagggacccaggccccacgagcggggccagagaggacagcccgaagaaggagac

SEQ ID NO: 253710 - RNA, 58 nt, Homo sapiens
cgcggcggagccgggcgcgaggcagggagcagaaccaacgcagcggacaccgcggagc

SEQ ID NO: 253711 - RNA, 58 nt, Homo sapiens
agcaaaaagacccaccaaggaagcagcggccacgccagaccaagggaacggaagcccc

SEQ ID NO: 253712 - RNA, 73 nt, Homo sapiens
ccaacgccccggggagaagcgaggcaggaaaccaggacagagaggacagggacgccgcccggaaaagccgcag

SEQ ID NO: 253713 - RNA, 37 nt, Homo sapiens
gcgaggcaaacacgagaagagacaaggaagcccccga

SEQ ID NO: 253714 - RNA, 75 nt, Homo sapiens
ggagcccaagcaccccaccgcagcacgccgggaggcgggacagcggaggaacggaggccagagggaccaagaaga

SEQ ID NO: 253715 - RNA, 115 nt, Homo sapiens
gggccagccaccggagagggggagaaacagcgcccccaaaagggacccaaagcaaccagaaacgccccggagcagccaggcacacgggacaagaccaccccaggacaaacagcaa

SEQ ID NO: 253716 - RNA, 81 nt, Homo sapiens
gcgccgcccacacgggcgcggacaccaaggggcaaaaagggagaacagaagaacagaaaagaaagcaccaacacaaaaagc

SEQ ID NO: 253717 - RNA, 70 nt, Homo sapiens
ccggccgcccggacgagcgagaccgcaccagaggacgcaacacagcaaccaaccccaggcaaaagaccgg

SEQ ID NO: 253718 - RNA, 73 nt, Homo sapiens
cgcgccggcccgaggcccgagaacaccgccgcccgcagccaccgccaacgaacccgggaacgcgagcaagcag

SEQ ID NO: 253719 - RNA, 66 nt, Homo sapiens
ccgaacggaccggcgagagaccagacaacccccaccacgagggggggaggcaccacccaggaccgc

SEQ ID NO: 253720 - RNA, 74 nt, Homo sapiens
ggagcagcagagcagggagacggaggaggaggagaagaagagagaagccagaggacaacagagcaaccagccgg

SEQ ID NO: 253721 - RNA, 80 nt, Homo sapiens
acgacagcgcaaggaggccgcacccaaggccgcagacaagacgaacagaaaagacgaacgagccacaagcagcagagaag

SEQ ID NO: 253722 - RNA, 75 nt, Homo sapiens
cagccgcgcgcgcgacacagagcggaccaacagcgcacccaacagaaaacacacgcccgcgcgcagaaaagacaa

SEQ ID NO: 253723 - RNA, 74 nt, Homo sapiens
acagcgggcaggagggaaaaaggaaaggaaggagagcggaaaaaagcagagagaacacaagccaagccgagaca

SEQ ID NO: 253724 - RNA, 80 nt, Homo sapiens
ggccacgcgagcgggaacagcccccaccggagcggagagagaacgaaacccaaccaagacccagcacacgggaaagggcc

SEQ ID NO: 253725 - RNA, 95 nt, Homo sapiens
ggagggccgagaagcggggcaccacgaaggaccgaagaggacagcgacagcagacaagcaacacaaggggaagaccggaaagaagccaaagaaag

SEQ ID NO: 253726 - RNA, 78 nt, Homo sapiens
ggagacaccccgggggccccgagcaaaccaggggggagcagaccggaagacccgacggaagaccacacccgaagggag

SEQ ID NO: 253727 - RNA, 70 nt, Homo sapiens
acgcgcggaaggcagcgcccagcagcgcagaaagccgggggcggcagaccagggcccagccggccaacgg

SEQ ID NO: 253728 - RNA, 106 nt, Homo sapiens
gcgggccgaggcgaaggagcggccgggagcccgccgcgcggagcggaagaaaacaccggagcccaagacaccaaaacagacgcaggcaagaggcagaaggacaaag

SEQ ID NO: 253729 - RNA, 74 nt, Homo sapiens
gagagccccgcggcagccgcgccggggccaaggccgggcaaaagacaggagaagaaggagaggcaccagccaaa

SEQ ID NO: 253730 - RNA, 68 nt, Homo sapiens
ggccggcaagaacagcgacaaggagagaagcgcggagccccaagcggagaaaaagaaagcggcgcgcc

SEQ ID NO: 253731 - RNA, 42 nt, Homo sapiens
ccaggagccagcacgaggggcagagagaagagcacacagaag

SEQ ID NO: 253732 - RNA, 52 nt, Homo sapiens
aagacggagaagagcaggaccggggcgacaggcacggcaagagaacagcccg

SEQ ID NO: 253733 - RNA, 77 nt, Homo sapiens
gcgcacccccggccccaggcccagccgcgggggcgcgggaggggaccggagaccgaggccggagggagacccaaaac

SEQ ID NO: 253734 - RNA, 74 nt, Homo sapiens
gacacagagccgggaagacgccgaagggcgggaggccaaagagggcgaaaaaaaggagccaaggaggagggcga

SEQ ID NO: 253735 - RNA, 65 nt, Homo sapiens
gagacagcagcgagacggcagcggcagcccagaacccagcccgcgacacacacagagcacgccca

SEQ ID NO: 253736 - RNA, 79 nt, Homo sapiens
cggggccccaggaccccacaacaccagaacaaaaggcagaaagcggggaaaaggcccgagcagcccggccacacaagaa

SEQ ID NO: 253737 - RNA, 79 nt, Homo sapiens
aaaccaggccgccaccgcggcaaaggcaaaggcaccggagcgcggcgagcgaggcacacagacacggggcgcgccacaa

SEQ ID NO: 253738 - RNA, 38 nt, Homo sapiens
ccaaagaagggagagaggccagccgccaggccaaagag

SEQ ID NO: 253739 - RNA, 59 nt, Homo sapiens
gaaaagcaaaaaaacaaggaaagccgcaacagaagagcagcgaagccagaaggaaaccg

SEQ ID NO: 253740 - RNA, 76 nt, Homo sapiens
aaggaaaggcgcaccaaggaacacgacgcaacaacggccagcccagggagaggcacacaaaccacgggggccccca

SEQ ID NO: 253741 - RNA, 82 nt, Homo sapiens
cagcccggcgcacggcccaggagccacaggcaaaacaggaccaagacgcgagccaaagaggagcaagaagacccgagaaagc

SEQ ID NO: 253742 - RNA, 54 nt, Homo sapiens
ggaacagaggaaaccagcccgcacaggagcccacagccccaccaccaggacaag

SEQ ID NO: 253743 - RNA, 72 nt, Homo sapiens
aaaaacgagagacagaagccaaagaaaggccccgagccccggccccaaagacccaaaacagagacacccccc

SEQ ID NO: 253744 - RNA, 75 nt, Homo sapiens
cccgggcaggcgaaagaggcggcggcgcgccgcggccggccacgcggaacagaacagcggcaacagacgcggcaa

SEQ ID NO: 253745 - RNA, 72 nt, Homo sapiens
acacgacagcaacaagacacggagcaaggaggaaaacacacggcccggccaacgcaacagggagcccacgca

SEQ ID NO: 253746 - RNA, 73 nt, Homo sapiens
cacaacgcgagcacacccccagaaggcacagccgagcaaggcacagccgcccacacaacaagcagcaccgcac

SEQ ID NO: 253747 - RNA, 89 nt, Homo sapiens
caagccagcagagaagggggcggcagcgccagcccggcgccccccccagccccagcgaagaacggaccgaagccaaagaacaagagcgc

SEQ ID NO: 253748 - RNA, 77 nt, Homo sapiens
ccgggcgaagcgggcgagcggggggacgccggcggagacgcgggcgagggggccggaaaaggaaagcacacaaagag

SEQ ID NO: 253749 - RNA, 77 nt, Homo sapiens
cgaaacgccgcacaaaaacaaggcgcggcggcggagcggcgcaggaagaagagagccaggcgaacgccgaggaacag

SEQ ID NO: 253750 - RNA, 81 nt, Homo sapiens
cgggacaggggagaggaacagcgagaagagcaagaaaacaagcacgggggccaaggagacaccgaccaaacgaaaaacgac

SEQ ID NO: 253751 - RNA, 81 nt, Homo sapiens
cggaccggccccacagccacaaggcaacccaacaacagccaccgggacacccgcaggccggggcagacaccacgggaaacc

SEQ ID NO: 253752 - RNA, 97 nt, Homo sapiens
acaggcagaaggcacaaggcaccgcggaggcagccgcccggagcgggagcgcggaggaacgcgggcggcagcagccgggagcggcggcagcaggccg

SEQ ID NO: 253753 - RNA, 79 nt, Homo sapiens
cgacccaggccaaccccggggcacgcgcccacaggcaaagcggacgccggaagcggagaagaagggcagggccgaccag

SEQ ID NO: 253754 - RNA, 81 nt, Homo sapiens
cagaaagcaggcgaacccgcggcgcaaaacgggaccgaaagacaacaacgcagagaagaacgccggccaacggaagcggag

SEQ ID NO: 253755 - RNA, 67 nt, Homo sapiens
gagaagagccagagcgggaggacgacgagagagcaaagaagccgcgaacgaaaaaaaacagccaagg

SEQ ID NO: 253756 - RNA, 86 nt, Homo sapiens
acagaaagagcaacagcagggcaacaggacaccaggggggaaaaaccacacaggcaaagaacgcgcaaaacaggacgaaaacaaag

SEQ ID NO: 253757 - RNA, 76 nt, Homo sapiens
agaagccagagcgaggacgccggcaggagaagacagaggagccagaccaagagacagcacaggcgagcgagcagag

SEQ ID NO: 253758 - RNA, 78 nt, Homo sapiens
ccgaggcggcggcgccgccgcgccacccgcccggcccccgccggcggcagcacggccaagacagagcccggcccaggc

SEQ ID NO: 253759 - RNA, 77 nt, Homo sapiens
cccagaagcgcaacaacaagagcagaaacccaacgggaacgaagggcgcagaaaaggggagagccgccacacaggcc

SEQ ID NO: 253760 - RNA, 49 nt, Homo sapiens
agacccacaacaccaggcgccagccacagaaagcccgccccagacaggg

SEQ ID NO: 253761 - RNA, 121 nt, Homo sapiens
cgggcggccggagcgcgggcagcggcagccggcgggagggcggggcgcccgcgggaccgcgcacgagccagggagccgccgggaccggcccgggagacgacaacccaaaccgaaaaggcaa

SEQ ID NO: 253762 - RNA, 84 nt, Homo sapiens
ggaaccagacgggagggcaccaggaccgcccccagggaaagggagcagcaccggccacacccacagcacgaccggaacccagcg

SEQ ID NO: 253763 - RNA, 76 nt, Homo sapiens
ggagagagcgagcgagggggggcgcgccggaaaccggagcgcgcagcaggccaagccgacgccagcgggcgccacc

SEQ ID NO: 253764 - RNA, 42 nt, Homo sapiens
cagaaggacgcagcagagccggcaacaccaacgcacccagcc

SEQ ID NO: 253765 - RNA, 79 nt, Homo sapiens
gacacaggaccgggagcgagaagcagaaggcccagggcagccggaaccaagggaccagcacaagagaggggcacggcgg

SEQ ID NO: 253766 - RNA, 64 nt, Homo sapiens
ggcaaagagacaaggagagaagaaccaaagaagcaaaacacgaggccaggcgaggccaggagac

SEQ ID NO: 253767 - RNA, 77 nt, Homo sapiens
cagaaagaaggaaaaagcagaaagccagaggaagacgaagggggggggcgggcgccgcaggcgcagcaaagcgaggg

SEQ ID NO: 253768 - RNA, 80 nt, Homo sapiens
ccagcggcgggcgggagcggaggagcgcgccggagaacgacaccaagcccggaaaacagaaaccagacgcagcagcggcc

SEQ ID NO: 253769 - RNA, 83 nt, Homo sapiens
agaggggagccggcccccgaaagaggacgaggcgaggaaccaaaggccaccccgccgagcccacccaccaagaagcacggacc

SEQ ID NO: 253770 - RNA, 96 nt, Homo sapiens
cccggcccccgccccagcccgccggcggcggcggccaccccacgcagcgcagcgccgcagagacaggcgcccccacaccagcgcacaagcccagga

SEQ ID NO: 253771 - RNA, 74 nt, Homo sapiens
acggagccgccacccagagcgcacggcgacgccccaggggaaaacccccgggaccagaggcaagcaaacaggaa

SEQ ID NO: 253772 - RNA, 63 nt, Homo sapiens
agaagagagacagggcaggcgccgggaggggccgggggccagcccggacccagccggaaaagg

SEQ ID NO: 253773 - RNA, 72 nt, Homo sapiens
acagacagaggccgcagcagcgccacccccaggcgagcggggacccaaaaccacacagcgacaccggacccc

SEQ ID NO: 253774 - RNA, 70 nt, Homo sapiens
cagaccaagagcgaacaaggccagacacccggagcaagccgcccgacgagaacgacgcacgacaaggaag

SEQ ID NO: 253775 - RNA, 110 nt, Homo sapiens
aaaggagaagacaaccggaagcggcagagagggaaacagacaacacaccaaaggagaagagaaaaggaacagccgaagccaggggcaagcgaaaccacagaagaaaggag

SEQ ID NO: 253776 - RNA, 86 nt, Homo sapiens
cggagcaagaaaaagagccgggagccagaggagacagaaaggagccaaacccccagggaggggggaagacagggcccagcaccaca

SEQ ID NO: 253777 - RNA, 57 nt, Homo sapiens
ggccgagcgagcgacagcgaggcgaagagccggaagagcgcagaagccggaagagag

SEQ ID NO: 253778 - RNA, 81 nt, Homo sapiens
cgcacaggccccacgacgacagccaggccggcacagcaaaggcaccgcccccggggaccacgacccacacacagcgccacc

SEQ ID NO: 253779 - RNA, 78 nt, Homo sapiens
acagcagcaaagcaagcagcagccagcagccacaaagagagcaaaagaggggccgcagcccccagaacccagaacaga

SEQ ID NO: 253780 - RNA, 85 nt, Homo sapiens
gagcgacgccgccgggcagcggcggccggacgggaagaggacgcaggacccaaagacaggaccacgcaccagcagagaaggaaag

SEQ ID NO: 253781 - RNA, 80 nt, Homo sapiens
caaaaccccagaacacggcacacaccaacgggagacaggagaaggccaaggaaaaggaacagagagagcagaaccgaaac

SEQ ID NO: 253782 - RNA, 41 nt, Homo sapiens
cccggaccaagacagcgccagggcacgaaaggcggagacag

SEQ ID NO: 253783 - RNA, 83 nt, Homo sapiens
cggcagacaagaaggcccaacccagcagaaggccagcagaaggagcccagcgaaggccaacaccaagagacccggggccgacc

SEQ ID NO: 253784 - RNA, 58 nt, Homo sapiens
gcaccccccaaagggcacagggacagagcgaagaaccccccaagaagacgaaaccccc

SEQ ID NO: 253785 - RNA, 61 nt, Homo sapiens
agaagggcgcggagggacgcacccccacagggcagaagagagaagaagaaggaggccgcgg

SEQ ID NO: 253786 - RNA, 29 nt, Homo sapiens
aagcaacggcggaggcgcaggaagggcaa

SEQ ID NO: 253787 - RNA, 84 nt, Homo sapiens
acgaaccgaccgggcgacccagaagcccgagaggcggggagccaggaacgggggacaaggagaggcacacacacagaaccacac

SEQ ID NO: 253788 - RNA, 80 nt, Homo sapiens
cggcgcgagacgaacgccacggggcagccgcaacaggggagaagacgcgcgccgggaggacgaacggacagccagaaggg

SEQ ID NO: 253789 - RNA, 59 nt, Homo sapiens
gaaccagaccaaaaacgcaacaacagacggcccaggcggcggcgcagcagacgggcacc

SEQ ID NO: 253790 - RNA, 74 nt, Homo sapiens
cgccagggcaaggccggcccaaagcacgccggccacggagagaagcagaaacgagagggaaaccgggcagagca

SEQ ID NO: 253791 - RNA, 72 nt, Homo sapiens
gaccagccggaagacggcggcacaggagcgcacgagcgggaaggagagcccggacccacccaccggccaaca

SEQ ID NO: 253792 - RNA, 46 nt, Homo sapiens
gccaagcgaaaccgcaaacagaaggacagggcagaccgccagcagc

SEQ ID NO: 253793 - RNA, 63 nt, Homo sapiens
gaagagacaaaagagggacacgcaggaaagcacgaggccaagggcggggaaggagcgcgagca

SEQ ID NO: 253794 - RNA, 75 nt, Homo sapiens
gcagaagggcgacgagaccaacaagacgagggcgcagcacaggggcaagccagccaccaaaccagagcagggacc

SEQ ID NO: 253795 - RNA, 79 nt, Homo sapiens
aagaccccgcgccaccaaagggagggcggccaaccgcacagacgaccaggcggggaagccaagaaaccagagcagaagc

SEQ ID NO: 253796 - RNA, 82 nt, Homo sapiens
agagaccagccggagaagcaggcggagcgcagcagcaccgaaagcaaccccgggcaggccccagcacggcccgcacaccccc

SEQ ID NO: 253797 - RNA, 96 nt, Homo sapiens
cccaccaaagagacccccggagaaccgggcccagcagcacggggggaggcaagcaggggggcaaaggaaagaaggcagaaagggaggccaggagcg

SEQ ID NO: 253798 - RNA, 81 nt, Homo sapiens
agggaaggcggacccaggcaacgccagcaacgcgggcagaggagcggagcggagaagccaagagcaaggcagacacaagca

SEQ ID NO: 253799 - RNA, 52 nt, Homo sapiens
gggaggaccgcggacgacggccgcagaggcggaagagcgcgggaggggaggc

SEQ ID NO: 253800 - RNA, 56 nt, Homo sapiens
cgaaaaacacccagacagcgaggaacaaaaagcccaccacccaaaccacgagaccc

SEQ ID NO: 253801 - RNA, 57 nt, Homo sapiens
gccaacaacgggaccagagagggagggaccggggcacgggccccccagcccgcggaa

SEQ ID NO: 253802 - RNA, 74 nt, Homo sapiens
agacaaccaggagaaggcggaagcggcgcgggggaggaacaacaacggcaacaggcagcaagaagggacacgag

SEQ ID NO: 253803 - RNA, 70 nt, Homo sapiens
ccacgaaggcggcaccaaggccaagccgacgccagcgggcgccacccaacaggcgcaccgcccacggccc

SEQ ID NO: 253804 - RNA, 78 nt, Homo sapiens
cgggggacagaaagcaagcgcaggacggagaacagaccggaaagaaaaggaagaagccgaccgcggagcagcagcgac

SEQ ID NO: 253805 - RNA, 79 nt, Homo sapiens
agaccagacaccccccggcagggaagcccggcgggcggacacaacccaaagggaaggggcccggccaggaccggggaag

SEQ ID NO: 253806 - RNA, 70 nt, Homo sapiens
cggcgaagaaggggacgccgacaaggcgggagcagcggagggggaaacagcaaccggggaaaagcacaga

SEQ ID NO: 253807 - RNA, 77 nt, Homo sapiens
cgcagcccccgcgcgggcagccaccccgcccccgccccccccgccgcaccaggcgagcccagacaccagaagcgaag

SEQ ID NO: 253808 - RNA, 88 nt, Homo sapiens
gagcggaacggagaaagcgaggaccgaggaggagaaggggcggcccggaggccgagaggagcggagagacaagacgaagcccggaggc

SEQ ID NO: 253809 - RNA, 74 nt, Homo sapiens
cccccaacccggacccaaggggcccaacgagccggggacccaggaagaaaaaaagaaaaggaacggaaaagcgc

SEQ ID NO: 253810 - RNA, 81 nt, Homo sapiens
cggcagccggggagcgcaggaaccagacgggggcgagcgagcaccgagcaacacacgcagaaacagccaacccgcaacaac

SEQ ID NO: 253811 - RNA, 77 nt, Homo sapiens
accagacacagcaaccccgggacacaccagagaggggcacgaggacagggagcagacagcccaggaaacgacaaaaa

SEQ ID NO: 253812 - RNA, 59 nt, Homo sapiens
gaggccagcagggaaagccccgcagcaacagggggcggcggcgcggccggaccccgccc

SEQ ID NO: 253813 - RNA, 83 nt, Homo sapiens
caaaaccagacgcgcggccaaggccacccaagaacggcccgccaccggagacaacgagaggagggaggaggacggacaccagc

SEQ ID NO: 253814 - RNA, 73 nt, Homo sapiens
gcaagaccagaccacagcagaaaagaggaagacccggagcaccacaaaacccacccgggaagcccaaaaccgg

SEQ ID NO: 253815 - RNA, 89 nt, Homo sapiens
cggacacccacgcaccaagagccgcacagcacaccggcaccgagagagcacccccaaggcgaccggccccgggcagagggcaggacgac

SEQ ID NO: 253816 - RNA, 75 nt, Homo sapiens
aggcggccggggccgggacgccagccaggaggacccccggggaaagggccaaggaagcgacagccaggaccaggc

SEQ ID NO: 253817 - RNA, 72 nt, Homo sapiens
gcgcccagaaagcagaacaggccaccgggccaacgaaaaaacgagggggaaccgagcaccgccaaagagcca

SEQ ID NO: 253818 - RNA, 67 nt, Homo sapiens
gcacccccaaggccaaccaagaccaagagaagacagaacacacgacaccagaagaaaccagaacaga

SEQ ID NO: 253819 - RNA, 77 nt, Homo sapiens
caccgccggcgcgggaaacgggcgaagcgacgagccgcgaggagaagccagcccaccgcgcgccacgagggccaaga

SEQ ID NO: 253820 - RNA, 77 nt, Homo sapiens
gcccacacaacccaggcaaccaacaggcccaccagcgggaggagagccaaccacgccgaggcaccccagaagcaagg

SEQ ID NO: 253821 - RNA, 69 nt, Homo sapiens
cagcgcgaccacgaaggccgcacccgaggcgggaacaagggggaaaccacaccacccgccacagacagg

SEQ ID NO: 253822 - RNA, 76 nt, Homo sapiens
gaagcagccgaccagccgcggagccgggggcaggagggcgaagggaagaagcagaaaccagcccgcccggagcagc

SEQ ID NO: 253823 - RNA, 77 nt, Homo sapiens
ccccagaccacaccggggcccgccgggacccagaagaccccaccccaccccgcccggaggacaacggacacgacagc

SEQ ID NO: 253824 - RNA, 75 nt, Homo sapiens
aaccgccaacggaccccgaggacaggaaaaacaggaaccgggagaacccaaggaggagaaggaaaaaggaaggca

SEQ ID NO: 253825 - RNA, 79 nt, Homo sapiens
cgcgcaggagcccccggagcgaccgcgcccccggacaccggcggaagggccccgaggcgccacaagcgggacaggaagc

SEQ ID NO: 253826 - RNA, 77 nt, Homo sapiens
ggcaagaccgagaaaggcacgagagaagccaccagcaagaagcagccaagagaggaaagccacaagggcgcagaagc

SEQ ID NO: 253827 - RNA, 93 nt, Homo sapiens
gccaaaaggggaacagagaaacaacaggccgagcaaggagagaacgcgagggaagggcgaggaaccaaagccccggcgcgcaacagaagagga

SEQ ID NO: 253828 - RNA, 83 nt, Homo sapiens
gcgagcccgcggggacgccgccggccagcagagcgagccacacccaccgcccgggcaggccacggcggagagggccgggcgcg

SEQ ID NO: 253829 - RNA, 74 nt, Homo sapiens
gaggaaacgaggagccggccggaggggccacggggccggggagccaccaggagacagcccagacaagcagggga

SEQ ID NO: 253830 - RNA, 70 nt, Homo sapiens
ggcgacaacccgaagggaggaggcagaagagccgcccgcgacgagagggaacccggccggaacgcacacc

SEQ ID NO: 253831 - RNA, 78 nt, Homo sapiens
cggaagaagcgaccaaagcgccgaggaccggcaacagggcggcggggaaaagggcgacaacccggaaaccacaaaagg

SEQ ID NO: 253832 - RNA, 96 nt, Homo sapiens
ggggccacgcgcgggcccgggccaggccgccgccgagccgagcaaagcgggccagacacgaagaggccggcgaaggaagaaggaccagccagagga

SEQ ID NO: 253833 - RNA, 81 nt, Homo sapiens
ccacggcaccgaggaggcggggccccaccacggagagagagccgggacggcagggaggcgaggaaacccagcggcggcaga

SEQ ID NO: 253834 - RNA, 76 nt, Homo sapiens
acggcccaggggcaggagccggcggcccccaggcccaacacgcccaacggccaaaacggacaagccaaggcacgag

SEQ ID NO: 253835 - RNA, 86 nt, Homo sapiens
gcggcgcacaacgcaggaacaccgcacgcgcggaggaggagagcgcgcgccgcgcgcccgcacaaacgccggggacaacaacccga

SEQ ID NO: 253836 - RNA, 79 nt, Homo sapiens
gagacggccgggagggcccgccagccgcgcccggcaagccagaccgggagggagggccgaccgaggggaccagcaaggc

SEQ ID NO: 253837 - RNA, 69 nt, Homo sapiens
gagcacagagcgagaccaggaaagaagggggcagaagaggggcggcccggcagcaaggcgagaagaaag

SEQ ID NO: 253838 - RNA, 41 nt, Homo sapiens
accagagcggggcaccgagccggacggacaacaggaagcca

SEQ ID NO: 253839 - RNA, 73 nt, Homo sapiens
gaagcccaccacaaaaacgaaggcggcggaagggagaagggacacaaaagcaaggcagaggcaacaggaacaa

SEQ ID NO: 253840 - RNA, 70 nt, Homo sapiens
gcggcggcggcacgaggcaggcgacgcgagaagggagcgaaaaacacagagaagaggaggaccagccaaa

SEQ ID NO: 253841 - RNA, 74 nt, Homo sapiens
gagccaaaaggggggacacccaagaggcggccccaggggggaccaacaagggagaaccaacagaacaaccggag

SEQ ID NO: 253842 - RNA, 62 nt, Homo sapiens
gacgaagacagacacacaagaggacagggagaaagggccccaagagcaagaaagcgcaaggg

SEQ ID NO: 253843 - RNA, 44 nt, Homo sapiens
gaagcacggcgggcgaaacagcccggccccgggcccgcacggcc

SEQ ID NO: 253844 - RNA, 82 nt, Homo sapiens
cggaggcggcgaagaccagggacgcgcacacgccagcgcgcggaccggagcggagaaccagcgccggaggcgccggcgggcg

SEQ ID NO: 253845 - RNA, 77 nt, Homo sapiens
gcagcagcgcacaggagaaagaaagacaaccgcagaccagaagcagacgggagagccaggcaagccagaaacaagga

SEQ ID NO: 253846 - RNA, 73 nt, Homo sapiens
aaaagaggggggagagccagggggccaaagaaggaagaccaaggcgaaggcgcagaacaaagacagagccaag

SEQ ID NO: 253847 - RNA, 51 nt, Homo sapiens
gcggcgcggacaggcccaaacgaagaagaagcagagagccaggaaaagaaa

SEQ ID NO: 253848 - RNA, 81 nt, Homo sapiens
accgaacagagcggaccagagcccccgagaagcgaaggaaaccccgaggcggcagaccaacccggacagcaggaacacaac

SEQ ID NO: 253849 - RNA, 74 nt, Homo sapiens
gcgaagaaaaccccagagcgggaaggcagagaccgcagaaggcccaggaaacgagggcaggaaggaccaaaaga

SEQ ID NO: 253850 - RNA, 74 nt, Homo sapiens
ggaagacgcccggggaggagcaggacgcagaaccaccaaaagccaagaaacggaaagagcggaggacccggacc

SEQ ID NO: 253851 - RNA, 72 nt, Homo sapiens
agacgacgcaccgcaggcagacaaaagggccaaagaagggagagagggaggcccgcccccccccacccccgg

SEQ ID NO: 253852 - RNA, 58 nt, Homo sapiens
gaaggaccaagaaccagaagccccccagggaaagcccaaccagcagacacgccaaaac

SEQ ID NO: 253853 - RNA, 75 nt, Homo sapiens
gagccagggaccagccagagaacgccccaacgggggacccaccgacgagcaagaggcccacgcggaccggcagcg

SEQ ID NO: 253854 - RNA, 73 nt, Homo sapiens
gaacccaccagcccagacgcccaccagcaaccggggaccccccagagagccagccaggagcccgcccaacagc

SEQ ID NO: 253855 - RNA, 86 nt, Homo sapiens
gccgccgcgccgcgccgcgccgcaccccgagcgaccgggacccccggacagccaacaccaaagccgcgggcacagcggccgcagcg

SEQ ID NO: 253856 - RNA, 95 nt, Homo sapiens
ggaagcacgcgcccgcacccgggaccagcacaaggagaccaggcccaggaaggaacgaggaagggccagaacggagacggggcgcgccgagaggg

SEQ ID NO: 253857 - RNA, 70 nt, Homo sapiens
gggggaagagccgcgacacgcggagcaccacacccccaaggcaagggcgcaaagccaacaacgagcgagc

SEQ ID NO: 253858 - RNA, 74 nt, Homo sapiens
gggaccccgccgcggcgggaggaccgaggaacgaagcaccggagaagcggacgagcaagacggaaaaaacagga

SEQ ID NO: 253859 - RNA, 76 nt, Homo sapiens
caagggcggcccgccgcacgcgccagcgcgggccacaggggaaaagaaacggcaaaaagaagcgccggccgaggag

SEQ ID NO: 253860 - RNA, 71 nt, Homo sapiens
aggcagacaaaagggccaaagaagggagagagaccagccgacagcgaccaaggccagagcgaaaggccacg

SEQ ID NO: 253861 - RNA, 77 nt, Homo sapiens
acacacagggaccaggagaagagaggagaacacagcaacagaagagaccaacccaagcgacccgccgggaaggaagc

SEQ ID NO: 253862 - RNA, 70 nt, Homo sapiens
cacgaacgccgcgggaagaagggccagaaaaaagaggaccacagacacaaggacaagaaagccaccagga

SEQ ID NO: 253863 - RNA, 84 nt, Homo sapiens
acaagaggccgacgcggcggccacagcggggccggggcccggaacggagagacagcccagaagcccagccgcacgaagcaaggg

SEQ ID NO: 253864 - RNA, 80 nt, Homo sapiens
gcagaaaagagacagagagaagaggaacagaagagaaagccggcggccagagaaggccacgagcggcacaggacagaacc

SEQ ID NO: 253865 - RNA, 68 nt, Homo sapiens
aagacccaccccaacaggaccagccagcaagaccgagcgacagaagaagggcaccaaaaagcaacacc

SEQ ID NO: 253866 - RNA, 79 nt, Homo sapiens
gacgcgcgcagcccgcccgcccggcgaccagcaagccaccaggacacccggaaagaacaggccaggcccagaccggcca

SEQ ID NO: 253867 - RNA, 77 nt, Homo sapiens
cagaaggacgccagcggagaacgcggcaaagcgaggaaggagaagagcagccagcaagcggaggacagcaggcagaa

SEQ ID NO: 253868 - RNA, 73 nt, Homo sapiens
gaaacagagaggggaaggagcccagcgacgcacaacgcccgaacgcaaacgagaaccgcaaaccccaaagaag

SEQ ID NO: 253869 - RNA, 71 nt, Homo sapiens
acgaccaaagggcacccagcccagacccacagcccaggacagcagaccacagcccggcaggcccaaaaacc

SEQ ID NO: 253870 - RNA, 82 nt, Homo sapiens
caccagaccgggagccggccccggggcaggcagggcccagcaggacgcggaaacaccccggaggcgacccaccccccagccc

SEQ ID NO: 253871 - RNA, 38 nt, Homo sapiens
ggcaaggaacaggcgagaaacagcacaagaggagagca

SEQ ID NO: 253872 - RNA, 70 nt, Homo sapiens
gaagaggcggcgggcaaaccacggcaacaacgcacaaaaagccagcacccacgacagaagaagagaaacc

SEQ ID NO: 253873 - RNA, 76 nt, Homo sapiens
gacagcccgagccaggcgcgcacgacccgacacgaagcagcggaaggcacgcagaagccagcggacgcccgcaacg

SEQ ID NO: 253874 - RNA, 69 nt, Homo sapiens
gcacggagccggacacgaaacgcacagcgacgaacacacacaccagaccggagaagcacagacgcaaac

SEQ ID NO: 253875 - RNA, 83 nt, Homo sapiens
ggcgcgcagaaccagaccgggagcacgcacccacgaggaaggagaggacggggaggagcgcgccacccgggcgggccaggacc

SEQ ID NO: 253876 - RNA, 52 nt, Homo sapiens
aggccacaaccaagagaaacaaccgaagcgggaccaacgaagacagcgcacc

SEQ ID NO: 253877 - RNA, 70 nt, Homo sapiens
cggcaaagcgcagcccgcagacagaggggcgacgaccgcacaacagaaggagacagggaacgcgcgggca

SEQ ID NO: 253878 - RNA, 71 nt, Homo sapiens
caaaagcacagaagcagccaggaagagggcaacccacggcgaaaagggcgacagcaagccagggggcagag

SEQ ID NO: 253879 - RNA, 95 nt, Homo sapiens
ccacagccaaggcgggagccacgggcgcccgcgccggcagaggaggcgagcacccgccagggagaggaacccccgcgcacccagcgcagaaggcg

SEQ ID NO: 253880 - RNA, 87 nt, Homo sapiens
gaagaggaccaaagcgaacacggaaacgcagagaacaagcagcccagacagaagggaacgaggccggcgcaaggcagaaaaaggcaa

SEQ ID NO: 253881 - RNA, 57 nt, Homo sapiens
gccgccaaggacgccggcccgggaagagaagccagaacgggacaagcaaggggccaa

SEQ ID NO: 253882 - RNA, 72 nt, Homo sapiens
gaaaaggaccaagaagccgccaagccacaacagaccaaacgggcaaaggaaagagcccagcaacacaacagc

SEQ ID NO: 253883 - RNA, 41 nt, Homo sapiens
ccagacagacgcgcaaaacccaggagacaggagggaccggg

SEQ ID NO: 253884 - RNA, 49 nt, Homo sapiens
acagcggacgccccagcacccccagcgggcagcccccaaccccagaacc

SEQ ID NO: 253885 - RNA, 79 nt, Homo sapiens
gcgcgccaggccgacagccgcggccgggcccgaggcccaaccaggaaggagacgccaggaggccagggcagcaccgggc

SEQ ID NO: 253886 - RNA, 55 nt, Homo sapiens
aaagacggacaggagaaaaggaacccccgcgagacagaggaagacaggccccgga

SEQ ID NO: 253887 - RNA, 54 nt, Homo sapiens
agcaagcgggggaccgaacaaggcaaaaggggacggccggagcagcagaacaag

SEQ ID NO: 253888 - RNA, 73 nt, Homo sapiens
gccgaaacagaaaacaagagaccacagaaggcgacaccccaagagggccgccaccacgaggagcaacccccaa

SEQ ID NO: 253889 - RNA, 75 nt, Homo sapiens
acacgcaaaccaccaaagcaggcaggaggcagacgaaggagagaacgcgggagaaccagcaaaaggaaaaaaagg

SEQ ID NO: 253890 - RNA, 84 nt, Homo sapiens
agcgaaccagaccaaaaacgcaacaacagacggccagaccgccccccggagcgggcccgccccagcccacccagagccggacgg

SEQ ID NO: 253891 - RNA, 60 nt, Homo sapiens
cggggggacagcccgggaccggccgaaaggcgaggaaccgggaggccaacagacccaacc

SEQ ID NO: 253892 - RNA, 78 nt, Homo sapiens
caccccacacccgcaggaccgcaggcgggcgccgcgcgagccacccagcgagccccgagaaccaagaacggaagacca

SEQ ID NO: 253893 - RNA, 80 nt, Homo sapiens
cagacccaacccagcaggacagcaccggggaaggccgaacagccaagccaaaaagagcacggaggagaagcagaggccaa

SEQ ID NO: 253894 - RNA, 69 nt, Homo sapiens
gcaaggccggaagaagagcgcagagacaccacgccacccaagagagagcaaaaaccgagaaccagaggc

SEQ ID NO: 253895 - RNA, 84 nt, Homo sapiens
cgcgcccagcacggacacagccacccccgacagggggccgccggccaggagcacaacgggcacggcgccagcaccaggagcacc

SEQ ID NO: 253896 - RNA, 84 nt, Homo sapiens
ccgaccacgcgaccccggccgcggggccaggaagcggaggagccccggaggcagagcggcgccagcaccgggaaccccaagagg

SEQ ID NO: 253897 - RNA, 81 nt, Homo sapiens
ccacggaggaacggcagagcggaagggcagagcggcgggaaaccaccaacaacacccccaaaccaaaacagccggaagcgg

SEQ ID NO: 253898 - RNA, 68 nt, Homo sapiens
gcaggaccgaccgaagcgcaagcgacacaggagcaacaaagaggcagaaggcggcagggagcacgcac

SEQ ID NO: 253899 - RNA, 75 nt, Homo sapiens
aagagcggagaacccacccacggccgcccgaagggccgaggacaagcagcgggaggaacaaccgcaaggacgcag

SEQ ID NO: 253900 - RNA, 77 nt, Homo sapiens
caccaggaagggagaaggagccaggaaggcccaccagacaggcgccagagccccaggcaccaagcccgccggaaaaa

SEQ ID NO: 253901 - RNA, 83 nt, Homo sapiens
ccaccaagccggagccacccaaagccagcagggcggaaaacaccccaaaagccaaaagggaaaggaaaagaccaacaacagcg

SEQ ID NO: 253902 - RNA, 67 nt, Homo sapiens
cccgcagaaggggcgaggagggggccccgacaagacagagaccagaacccccacccccagcaggaca

SEQ ID NO: 253903 - RNA, 78 nt, Homo sapiens
gagaaacacgaagaaggcaaccaccccccaagacaagggagagaacagaggacggcacgaaaaggaacaggggagcag

SEQ ID NO: 253904 - RNA, 86 nt, Homo sapiens
ggccaacccgcgccgccggcccagccccgcgcgcccccaccccagccccccggcggcccgcagcacagacgcagccagcaaggaag

SEQ ID NO: 253905 - RNA, 57 nt, Homo sapiens
ccgcgcggcaggcgccaccaaggcagccaaagaaggagagccagccaggcggggcac

SEQ ID NO: 253906 - RNA, 88 nt, Homo sapiens
ccagccccacacggcaagacacagagagacggcagccgcgacagacacaccacggaacggcagagcgaaacaaacaagagggcgaacc

SEQ ID NO: 253907 - RNA, 79 nt, Homo sapiens
gagacacaaacaaggagggcgagagagacagggaggaagcgaggaggaccagccaccccacacagcccggccgccgccg

SEQ ID NO: 253908 - RNA, 76 nt, Homo sapiens
gagcgcgaaacgcacgagaaggacagacgaccgggcggcaaaaagaggaaggcacagggaagaagcaagggagggg

SEQ ID NO: 253909 - RNA, 41 nt, Homo sapiens
ccagccgagacccacccaggcacagccagagaacaacacac

SEQ ID NO: 253910 - RNA, 77 nt, Homo sapiens
gccggcgcgccgccaggaccaggaaccacacaggaaagagcagcggagcccaagagagaaaaaagcaacaaaagcag

SEQ ID NO: 253911 - RNA, 87 nt, Homo sapiens
agaaccggcccacgcgcggacggcgcggccgccgcgccccggggagagaggcgagcgcggcgcccggaccgcgagcgcaccccggaa

SEQ ID NO: 253912 - RNA, 105 nt, Homo sapiens
ccacaccaccagaagaacaaggccccaaggcggcagacgccccccaggagacaccgaggaagcccaagccgagagggaagcacaggcggcagcccacaggagcca

SEQ ID NO: 253913 - RNA, 61 nt, Homo sapiens
ggcacgacgcgcaagaagacgcaaacacaaggaaggaaccaaccgaggcagaaacggagca

SEQ ID NO: 253914 - RNA, 82 nt, Homo sapiens
aagagagggagcacgcacgggaaccggaccaggaggaggcaggaccaaaagggaaaagcaccgaaaaggagaacaaccccgc

SEQ ID NO: 253915 - RNA, 80 nt, Homo sapiens
aacaacagaagaggagagaggaacccgaagaagaaaggacgacagccagagagccaaaagaagcaagggaaagaccagga

SEQ ID NO: 253916 - RNA, 77 nt, Homo sapiens
acaacacagcgagcgaaaccaggcgaggcaacagcaccggaagcacaaagagagcggagcagagccccaagcgacag

SEQ ID NO: 253917 - RNA, 54 nt, Homo sapiens
agagcaagcgggggaccgaacaaggcaaaagggagaaggcaccggccaaagggg

SEQ ID NO: 253918 - RNA, 58 nt, Homo sapiens
gggcgggcggcggccccggcagggcggagaacggaaaagcaccaggaagcagagagga

SEQ ID NO: 253919 - RNA, 41 nt, Homo sapiens
gccgaggccgagacgccagagggccgggccgggggcacgca

SEQ ID NO: 253920 - RNA, 79 nt, Homo sapiens
gggaagaccacaaccacgaccacaaaccggcggagccacagaaaaaggcacaaacccagcacagagaagacggcgacaa

SEQ ID NO: 253921 - RNA, 80 nt, Homo sapiens
aagaaagggcagccagagccggaagacagaggccacaccaggaggagaagacaaccaggggagagccaccaagaccgggg

SEQ ID NO: 253922 - RNA, 69 nt, Homo sapiens
aagaagcggaacagccgggagaaacccgaccacagggagccgcaaagaaggagccaagggcccacgcag

SEQ ID NO: 253923 - RNA, 72 nt, Homo sapiens
gcgggaaagaaggcaaaacacggcagggcagaaaagaacagacccagaagaagcgaaaggggagaaagaaga

SEQ ID NO: 253924 - RNA, 49 nt, Homo sapiens
acgcagggcgcccccggccacgagggccccccacccagggggccgccca

SEQ ID NO: 253925 - RNA, 81 nt, Homo sapiens
caagcgccggagcccgcgcgcgccgcggagcaagcgcggagcgcgcccggggaccgcaggacaacggccacacagccaggg

SEQ ID NO: 253926 - RNA, 69 nt, Homo sapiens
cccgccggcacgcgagccccagcaaggagggaggacaggcaggggagcgggagcaagcaggcaggggca

SEQ ID NO: 253927 - RNA, 69 nt, Homo sapiens
caaaagaggaagccccagagcacgaaaagaaacaaagcgcaagcgagagagaggggcacaacccccaca

SEQ ID NO: 253928 - RNA, 69 nt, Homo sapiens
ggcgagcggggccggggcgccgggccggccccccaggaaccaacacagggagggccaagaaccccagaa

SEQ ID NO: 253929 - RNA, 66 nt, Homo sapiens
accacgcccaacgaacgaagggggcgaagagaaccagagacagaaaccgcccaacccggagagccc

SEQ ID NO: 253930 - RNA, 73 nt, Homo sapiens
gcacggaccaggaggcgagcaacaggaaaaccgccgccggggccagcaagaacaaaaagcaccaacagaccca

SEQ ID NO: 253931 - RNA, 77 nt, Homo sapiens
cggcagccacgagccgagaggggaaccagggacagaaggagaccggggagaaaagcgcaagacccaagaggacacac

SEQ ID NO: 253932 - RNA, 72 nt, Homo sapiens
gagacccaaggaacaggccaagagagccgaacccaccgagccagggagagccgggcacaaagccagcgagcg

SEQ ID NO: 253933 - RNA, 70 nt, Homo sapiens
ggacagacaaaaggaggcaaggcaagacgaagcagagaagacacggaagaccccagaccaaggaaggcgc

SEQ ID NO: 253934 - RNA, 40 nt, Homo sapiens
gccgccgcgcccacccaaccagaaccagagaacagcagag

SEQ ID NO: 253935 - RNA, 75 nt, Homo sapiens
gaacagaaaacgcaaggagaaacccaagagcagcggcaggaaggcggaccccggcagcaagcaacagagcgccaa

SEQ ID NO: 253936 - RNA, 42 nt, Homo sapiens
acagcaagaaaccccacagccaaggaacggacaccccagcac

SEQ ID NO: 253937 - RNA, 79 nt, Homo sapiens
aaacgaagagacggaggaaaccacaggacggaagcacaggggccaccagagcgcccgagaagacaaaccggcgaccaca

SEQ ID NO: 253938 - RNA, 71 nt, Homo sapiens
gcaggcacccggaccgcgaaagaacgagaaacgacagcagaggcccccccgccagaccggcaggaggaagg

SEQ ID NO: 253939 - RNA, 69 nt, Homo sapiens
aaggaacagcagacaagacgagcccaccacggacagcaaacagacccgcccagaaaccaacagaagaag

SEQ ID NO: 253940 - RNA, 73 nt, Homo sapiens
gcagcgcccagcagcgcaggcgcaagagaacaacgaagggaaacgccgggcaaccgaagaaaacagcgacagg

SEQ ID NO: 253941 - RNA, 72 nt, Homo sapiens
aggaaaaacggagagccacaaaaaaggaagcgaaagcaaaaccaccggaggaacgaccaaaggagaaaacag

SEQ ID NO: 253942 - RNA, 84 nt, Homo sapiens
agcagcgcagcgcgcgcagagcgcgccaggacagcccagagcaagcacacggaggcccgggagccagaccgggagcccgcccca

SEQ ID NO: 253943 - RNA, 80 nt, Homo sapiens
cacaggacaggagagaaagacgagccagccgccgcgccaagaaacgcgcggccgggccgaccaaagccgggcaacgcccc

SEQ ID NO: 253944 - RNA, 62 nt, Homo sapiens
gacaggaggagacaggcgagagaggaggacacgaccgaggcccacgcggaccggcagcgcca

SEQ ID NO: 253945 - RNA, 84 nt, Homo sapiens
gaggagacacagcaaggaggagccccgaccccacccggggacacggcaccaggcggccagcgcaagacccgaacccgagaaccc

SEQ ID NO: 253946 - RNA, 89 nt, Homo sapiens
agcagcaggcgggaggaagaagaaggcggaaggcggcggaggcggcggcgccccggggcccggcggcgggagaagacagaggagccaga

SEQ ID NO: 253947 - RNA, 82 nt, Homo sapiens
aacaacaagagaaggacagcggccaacaagaagaccaagaaacacacgcagggggaccgggccaacaagaagagaacgccac

SEQ ID NO: 253948 - RNA, 84 nt, Homo sapiens
cgacgacccagagcacgggcccccggacgcgagcccgcccccgagggaaaggaaaccaaaccaggaaagaaggacaaggagcga

SEQ ID NO: 253949 - RNA, 72 nt, Homo sapiens
agcggaacacggaacaaccagaggaccggcaacaacccgaggacgaaccaccccgcgccagcagcacagcac

SEQ ID NO: 253950 - RNA, 77 nt, Homo sapiens
acccgccccgcccaaaagaccaccgcccaacacaacacgcagggagcaacgggaagggaagcagacagcaaaacgcc

SEQ ID NO: 253951 - RNA, 71 nt, Homo sapiens
cgcggccgagacaaaggcaccaggccaccacagaaacaaaagcaacaaagaggggaacgggcgacgaagcg

SEQ ID NO: 253952 - RNA, 66 nt, Homo sapiens
agaaaccccggacaaggcacgccagacgggacaagagaaaaaaagggcgggcgaacaaaaagagca

SEQ ID NO: 253953 - RNA, 63 nt, Homo sapiens
ggaacgaaaacagaagcacagcacagcccgaagcgccaagggggcgccacagggaaggaccaa

SEQ ID NO: 253954 - RNA, 36 nt, Homo sapiens
aaacagacgccagcagggaggaagagacaagcccac

SEQ ID NO: 253955 - RNA, 99 nt, Homo sapiens
cagcagcccgaagagcaaggaagaccaaaaccaggggcaaaggacagacagaagggacggaagggcccgcaacgaacgaacgaaccgagagaaggggaa

SEQ ID NO: 253956 - RNA, 76 nt, Homo sapiens
caaaacccaggcgacgcagcacaaaaggaacaagcacaagccagcaaggaccaccgcgaccgaaacacgagaaacc

SEQ ID NO: 253957 - RNA, 75 nt, Homo sapiens
caacaaacaggggaaggacacaaaagaaagcgacaaggaacaagcgggcgagcaagaacaagccggaccaaaagg

SEQ ID NO: 253958 - RNA, 57 nt, Homo sapiens
cgggaagacagaaccagggccgggggccagcgccagggagccaggagacccgaagca

SEQ ID NO: 253959 - RNA, 78 nt, Homo sapiens
acaaaaagacccgaaaggaccccaacacagacggacagaaggcacgggggcccgcacgagaaagacacggcagcgcag

SEQ ID NO: 253960 - RNA, 78 nt, Homo sapiens
agacggagcggcggcccgaagagccagccgccgcgccaagaaacgcgcggccgggccgaccaaagccgggcaacgccc

SEQ ID NO: 253961 - RNA, 69 nt, Homo sapiens
cgggaacccccacgcggccagcgaaaacgcccaggcgcgcgacgggaccacaggcgaccgggaccacgc

SEQ ID NO: 253962 - RNA, 60 nt, Homo sapiens
ccagaggcgacagagacagcagaagaggaaggaagagaggaaagagcggcaaagcagacc

SEQ ID NO: 253963 - RNA, 75 nt, Homo sapiens
ccaggagcgacccgaccaaaaacaggaaggacaaacaccagaagcagacaagagaaaggagcaagaaccaacgaa

SEQ ID NO: 253964 - RNA, 70 nt, Homo sapiens
cgaaggcagagcaaccggcacagaaacgcacagagcagggcaaaccgagacccagcgcagccgaccccaa

SEQ ID NO: 253965 - RNA, 80 nt, Homo sapiens
aaggagagaaaagccacaaagagcagagaagacggaggagagacacacgcccacgaggaacagacaaggggagagaagac

SEQ ID NO: 253966 - RNA, 70 nt, Homo sapiens
aaacggcacacccaccaagcacccaacagaagaagagaaaccagagacacacagaccacagacagcccga

SEQ ID NO: 253967 - RNA, 52 nt, Homo sapiens
acaaggagacccgggaggaccaagccgaacggagaaagaagaacaaacacaa

SEQ ID NO: 253968 - RNA, 78 nt, Homo sapiens
cagccgggcgagggcagaagccaccggcggagaccaacacgaaaacgacgcaggagaaaggaccagaaagcccagaaa

SEQ ID NO: 253969 - RNA, 63 nt, Homo sapiens
cgcacacaagacgccacgaaaagggcgagccgcccgagccagagggacaaagacgccaacgac

SEQ ID NO: 253970 - RNA, 72 nt, Homo sapiens
gccaggaggaccgcaggaggacgcagacggagcggcccggcagcaaggcgagaagaaagaggccagacagga

SEQ ID NO: 253971 - RNA, 72 nt, Homo sapiens
cgcagcaaagccagccaaagaaacggcaagcaaagacagaagcccgggggcaaaacacgggagaaaaggaaa

SEQ ID NO: 253972 - RNA, 60 nt, Homo sapiens
gcgcgggaagacgcgcgcgaggccgccgaggggccccccgaggcacccgcaacaccagac

SEQ ID NO: 253973 - RNA, 85 nt, Homo sapiens
ccgagagccgggggagcggggccccacacccccccgggggggagacaccaggcgccgagaaggccagcagagaaacaggcaggag

SEQ ID NO: 253974 - RNA, 77 nt, Homo sapiens
aggacagccgaggcccaagcccgcggagcacccgccggccagagaagagaacaggggcgacagcaagaaggagccag

SEQ ID NO: 253975 - RNA, 61 nt, Homo sapiens
aagcgaaaacagaccgcgagcccagaggccggggggggcacagagccccggaagacagccc

SEQ ID NO: 253976 - RNA, 61 nt, Homo sapiens
ggagggaacaaagcccacagcaccgaccagggaagggacgagacagaccggagaggacggg

SEQ ID NO: 253977 - RNA, 66 nt, Homo sapiens
caggggcaagacaagccagaacgagaagcgcaccacagacaccggccgagaaaaagaccgaccagc

SEQ ID NO: 253978 - RNA, 79 nt, Homo sapiens
cacaaccagagcgccaagaagcaccacaaagaaagcccccgcagccaccgccacccaggaaggccaacaggggaccgca

SEQ ID NO: 253979 - RNA, 78 nt, Homo sapiens
cagggagcagaggaagaaggggaagaaagagacagccgcggaaccaccaggaaaggacaggcacagcaggccaacgca

SEQ ID NO: 253980 - RNA, 79 nt, Homo sapiens
agggccgggacagggagcaccggaaagaggacgaagcagaaagcaaggaaacgagcagaagcccgagaaaagcacagca

SEQ ID NO: 253981 - RNA, 72 nt, Homo sapiens
gaggagcccgggccgggccaccccggaggcggccccaggggggaccaacaagggagaaccaacagaacaacc

SEQ ID NO: 253982 - RNA, 61 nt, Homo sapiens
ccccagggcaagacgagggagaagccagggagcgagcacaaacgacacacgcaaaccacaa

SEQ ID NO: 253983 - RNA, 78 nt, Homo sapiens
aggcgaaagcaacagcgggcagaggagagcgagcagcagcagcagcaaggcggggacccaggagagagagagaggcca

SEQ ID NO: 253984 - RNA, 76 nt, Homo sapiens
ggccccgccgagcccagcccccagaaaggaggacaacgggacccagaagaggggaacaccgcagcaggagacgcgc

SEQ ID NO: 253985 - RNA, 79 nt, Homo sapiens
gggggccagacggagccagaccggaacggggccgcacccgcggggcccccaggaggcccaaggaacagcacagcagcga

SEQ ID NO: 253986 - RNA, 74 nt, Homo sapiens
cgccgccgccccgccagcgccagacggacgaggcggcggagaacaagcggcaggagcaggaggagaagaaaccc

SEQ ID NO: 253987 - RNA, 86 nt, Homo sapiens
cgacaagcaagcagagccccccaggagcgaagggacccgcgcgaccccgggggcagcacgccacacagacagaccaacagagcaga

SEQ ID NO: 253988 - RNA, 70 nt, Homo sapiens
agccgcaaccccgcgccggcgggcgcgcgagcgcccgcgcacaggagcgagagacccaccccacccgcgc

SEQ ID NO: 253989 - RNA, 72 nt, Homo sapiens
cacaccgcgggacgacaagaggaccccgcgcaaccggcacaacaggcagaggcacggggccaaaaaggcacg

SEQ ID NO: 253990 - RNA, 73 nt, Homo sapiens
gaaaccggagcacccacagccacaaaacgaaacaaccaccagccgcaggacccaagaggagacaagagaaggg

SEQ ID NO: 253991 - RNA, 64 nt, Homo sapiens
agaaggaccaagaaccagaagaagcccaggacccaggaaggagacacaggaaaacaaagcccca

SEQ ID NO: 253992 - RNA, 98 nt, Homo sapiens
cccagcgacccgaccccgcgcgacgacccgccgccgccgggcggagacagaagcgaaggggacagggggagaaccgccagggaaacccgggggacaga

SEQ ID NO: 253993 - RNA, 116 nt, Homo sapiens
ccgaggggccaaccagcgaagagcgacaagccgcggcagccgcggaccaccgccgccaggccccgacacgagacggccaagagacgagggagagaacacccagcccaggaggagac

SEQ ID NO: 253994 - RNA, 73 nt, Homo sapiens
ggcgggacggaggccagagagagacgacaggaaacgcggcggggcagaacagaaacaaaacagcagcacagag

SEQ ID NO: 253995 - RNA, 78 nt, Homo sapiens
ggcggcccaggcggggacgaccaaagcaaaaaaaaggccagaggacaggccgagaggaaagaggagccagagaagcgc

SEQ ID NO: 253996 - RNA, 71 nt, Homo sapiens
aagggccaagcaacggagaccgggggggcaagcaaccagcccccggaaagagccgcccgagagacaaaccc

SEQ ID NO: 253997 - RNA, 81 nt, Homo sapiens
caagcgcgggaaccaacaccaacaggaagccagcagaccgcagaacggccccgggacccacccaccaaaaccaacaggaag

SEQ ID NO: 253998 - RNA, 77 nt, Homo sapiens
ggaggagggcggagacgagaaccaccaccggagagagcgaggacacaggaagagaccaaagacccaggagagcgagc

SEQ ID NO: 253999 - RNA, 78 nt, Homo sapiens
gcagagggcaccagggagaacggagaaacagcccagaaaaaccacggacgccagggggccagaggcaaaccagcacag

SEQ ID NO: 254000 - RNA, 74 nt, Homo sapiens
ggaaccgaagaacagacccagacccaccagccacaaaccagccaggaacacggccaaagccccagaggacaagc

SEQ ID NO: 254001 - RNA, 83 nt, Homo sapiens
gggggcagcaacggcgacaccagcaaggaccaagaacgcccagcccgcgggcaccggcagaaaggaggaggaaaacaccccca

SEQ ID NO: 254002 - RNA, 77 nt, Homo sapiens
gaaaaggggcgcggcccggagggcggcccaggaggggaaagacccggaacagccacacggccccgggaaaacccgcc

SEQ ID NO: 254003 - RNA, 76 nt, Homo sapiens
cccagggaaggaagggagcgaaagccgggaggcgaaaccagaccacccaacacacaacggcccagccaaacaagca

SEQ ID NO: 254004 - RNA, 78 nt, Homo sapiens
gcgggagcgagaccgggccccgacggccggcgaccgccacgggccccgccagcagagcgcacccaacgcacccgcacc

SEQ ID NO: 254005 - RNA, 81 nt, Homo sapiens
caccccgagccccggcacccagcaagggacgaacagcggggacgccccagcagaccgcccaggagaggaaagcaggaggaa

SEQ ID NO: 254006 - RNA, 58 nt, Homo sapiens
ccccagcaaagccaggacccaccacgccggcagggccagaacagccaggcgagcccga

SEQ ID NO: 254007 - RNA, 74 nt, Homo sapiens
aagggaaagaggaggagaggggcgagcaggccggagggaccgggaagggcacacaagcaacagaagaaaaggag

SEQ ID NO: 254008 - RNA, 72 nt, Homo sapiens
cagcaggacaagccagcgcacagcaacagagaggaaacagcggaggaggccacaggcacgcacgaagacgcc

SEQ ID NO: 254009 - RNA, 64 nt, Homo sapiens
aaaaaagacgaaagaagaagaagagcaaagggcccgcagcgagcgccccccggaccgagaagcg

SEQ ID NO: 254010 - RNA, 84 nt, Homo sapiens
cacacagcaaaagagacagacggacaacagcccaacaacacccaggccaagaacggcggcagaaagcaaaggcagaaacaccag

SEQ ID NO: 254011 - RNA, 80 nt, Homo sapiens
caggcggcgcggacggggcgggagaacccgaggcgaggaagaaagacaaccaagaaacggaagaagaggggacagacgga

SEQ ID NO: 254012 - RNA, 81 nt, Homo sapiens
ccgcgcaccgacccgacgcgccggcccacgcgcggccaagggagggcgggggcggcagagggcacgcccaggggacgggca

SEQ ID NO: 254013 - RNA, 84 nt, Homo sapiens
ggacggcggcccggcccgcgcggagcggcccaagcacgaccggagcgagcagggccaaaaaacagagcagcgaccacaggaccg

SEQ ID NO: 254014 - RNA, 78 nt, Homo sapiens
accacgaagaagccagcggcgagaaacagaaacaccaaacggcaagcgccagaaaacaacgcagcaggcgcaaaaacg

SEQ ID NO: 254015 - RNA, 79 nt, Homo sapiens
gccgaccccaggcagccccgcacgagcggcaaccgaaagccagcagcgggacggcgcccagcgaggggccggcacccgc

SEQ ID NO: 254016 - RNA, 73 nt, Homo sapiens
gcggcaaagcggggaggccagcgacgccaggaagaaaacgaagacagggggcggggcggggccagagaggaac

SEQ ID NO: 254017 - RNA, 79 nt, Homo sapiens
ggcggaacggaccagaccacagaagcacggcacccgaccacgccccggaggaccagccggagagaaaaagagaagaacc

SEQ ID NO: 254018 - RNA, 63 nt, Homo sapiens
aaacgggcgaagcgacgagccgcgaggaggacagcccagagcaagcacacggaggcccgggag

SEQ ID NO: 254019 - RNA, 123 nt, Homo sapiens
ccgggccgggcggaaccccccagcccaccggagaagccaccagcgcggagccgagagcgagacgacacagaagcagcaacaaagaaagacacgccagcaaccggagccggcagaaggaaaccg

SEQ ID NO: 254020 - RNA, 53 nt, Homo sapiens
agcacaaccccacaagagaagacaacaggaaaagaaacccccgaacccggcag

SEQ ID NO: 254021 - RNA, 88 nt, Homo sapiens
aaaacagcagcgcgggcaaccggggaccccggccacggagcaggcaccgacaagggcgcacccacgacgcgcacaccaccggcagacc

SEQ ID NO: 254022 - RNA, 79 nt, Homo sapiens
ggacacggggcagacacaacacgaggggcgccgcgggacgcagaggagagggaaaaggggcgaggccggccgaccgaca

SEQ ID NO: 254023 - RNA, 92 nt, Homo sapiens
cccagcaccggacaaagaaggggacccagaccacccaacccaagggggagccgagggcccggggcgaagcaaccaccccgcagacgccccca

SEQ ID NO: 254024 - RNA, 77 nt, Homo sapiens
gaagcacagcagcaaaagcaaagacccccggggcgccaccggacaggcgcagagccagaaggcaaacacaaccgcag

SEQ ID NO: 254025 - RNA, 43 nt, Homo sapiens
ccccgagagcgagaacagagggccccccccacaggaaaccgca

SEQ ID NO: 254026 - RNA, 73 nt, Homo sapiens
cccaccagacagccagcacaggaaccagcccacgaaggaccaagccaaccagaagaaaaaagcccagaagcca

SEQ ID NO: 254027 - RNA, 73 nt, Homo sapiens
ggcgaggagcccaggggccggcacccccaggggcaaggccacgcccgcaacgagccgcccaggaacacagacc

SEQ ID NO: 254028 - RNA, 74 nt, Homo sapiens
aaacggaaagaaaggaaggaacaagaggccggaagccggagaagccggagagcaccagagagacggggcaccgg

SEQ ID NO: 254029 - RNA, 68 nt, Homo sapiens
ccgagggccccgagcccgagcgccccagcccgggcccagcaacgcgagcagcaccaggaccagagagc

SEQ ID NO: 254030 - RNA, 85 nt, Homo sapiens
agcaagaggcgaccgggcaggcaggacccggcagcaaccccaacaaacgccagaggcagccccccccgggagacaccccgcagaa

SEQ ID NO: 254031 - RNA, 80 nt, Homo sapiens
agaaaccaacaagaaaaagaccgggcaaagaaggcagcgcacagcccagcggaggacacgccggggcagggcagccgaga

SEQ ID NO: 254032 - RNA, 61 nt, Homo sapiens
cgccacaccgacccacaggagcgcccgcggaggagcgcccgggcccgccggagagggaaca

SEQ ID NO: 254033 - RNA, 74 nt, Homo sapiens
ccgggaccccagcgacccggagaagacccgagcacgagccagggagccgccgggaccggcccgggagacgacaa

SEQ ID NO: 254034 - RNA, 82 nt, Homo sapiens
acgacggagacgcagagggacgaaagaagcgcagcggaggaaggcgagaaccagccccaagcacgggaagacccccagccga

SEQ ID NO: 254035 - RNA, 74 nt, Homo sapiens
gggaaggagaagcccaacaaagccccacagcagccagaaggaaagcaggacacaccaccagcaaggcaaaaaag

SEQ ID NO: 254036 - RNA, 84 nt, Homo sapiens
cgaacagaccgagaccgaggagcgcccaccagaagcaggcgcccacccagagcaggcccggacgggccccaagaagagcagcgg

SEQ ID NO: 254037 - RNA, 87 nt, Homo sapiens
gaggaaccgagaagagcagagcggagggagccccagacacgccggcacagccacaccgagaagaccggcccaagaaccccaccgccc

SEQ ID NO: 254038 - RNA, 68 nt, Homo sapiens
ccccagaacacaacagggcaaaggccccgacaggaccacggcaggagaagaacacagccccacccaaa

SEQ ID NO: 254039 - RNA, 53 nt, Homo sapiens
cacccagcgcacacaccaccacacacggacacgaggaggggacggcccgccac

SEQ ID NO: 254040 - RNA, 79 nt, Homo sapiens
gccaaggcgacccccaccgagacgaagcgggcggcgaagggagagcagaaagacgagccgccggggaaaaagcgcagca

SEQ ID NO: 254041 - RNA, 78 nt, Homo sapiens
cggaccgagaccggaccgagagcggaccgagagcgcgaaacgcacgagaagcccggaccgacaggaaagaaggagccc

SEQ ID NO: 254042 - RNA, 61 nt, Homo sapiens
gaagcaaacaaaaacgccagcagagaggagagacggaaaaggaggccagcagaaacagcag

SEQ ID NO: 254043 - RNA, 78 nt, Homo sapiens
agaaacacggcaaaaagaaaaaccagcgaagcacaggcaagaaccacgaggccacccgacacgggagccacaccaggc

SEQ ID NO: 254044 - RNA, 77 nt, Homo sapiens
gagccccgggcaaaggccagcccgcaggcccaagcaagcgacgccggaccgcgaagagacgagaggggcacggaagg

SEQ ID NO: 254045 - RNA, 77 nt, Homo sapiens
caggccagccagaaccagggccaacagggacagccgcaaccaggaagaccagcgaacagcagggagaaagacaggcc

SEQ ID NO: 254046 - RNA, 80 nt, Homo sapiens
gagcagaggacccggcgggcggcccgcgggcaggccccgagccccggccccaaagacccaaaacagagacaccccccagc

SEQ ID NO: 254047 - RNA, 84 nt, Homo sapiens
ccgcccagcgccgccgccccggacagcggccccgaagcgggcggccgcaccgggggggcggccggccgcagagcaccgcgcgga

SEQ ID NO: 254048 - RNA, 68 nt, Homo sapiens
accaaagcgaaggagggccgcaagagcaaccagaaaccgagaccgaagcaacaaaaacgggggaaacc

SEQ ID NO: 254049 - RNA, 78 nt, Homo sapiens
aaaacccagcgagaccgggccggaacgaaagcaggacggaggagcgaccaccggacgcccgaggggggaggacgccac

SEQ ID NO: 254050 - RNA, 79 nt, Homo sapiens
cccagaaggggagcgcggaccgacgggaagggcagaggaaaggaggcacgcgagaagacacaccagcaaccacacggac

SEQ ID NO: 254051 - RNA, 76 nt, Homo sapiens
gagcccgcccaaccagggcggaaagaaggggccgcaaggccaggcgcgcagaggcacccaacggcacagaccccac

SEQ ID NO: 254052 - RNA, 79 nt, Homo sapiens
aaacagcggagaaggagaagggagaagaaacagcagccgcagaacaaagaaccaggaggcagcaaggacgagcccaagg

SEQ ID NO: 254053 - RNA, 73 nt, Homo sapiens
cagcacggcgcaacaggaccacagcaagacgacaagcacggacagaggcgggcaagaaagacccgcacagagg

SEQ ID NO: 254054 - RNA, 75 nt, Homo sapiens
gaaaaaaacacggaagaagagaagaggaacaaaagagagcaaaacaagcacgacagccacagcacgcgccccagc

SEQ ID NO: 254055 - RNA, 84 nt, Homo sapiens
accgacagaggaggagcgagaacagcagaccagccccacccaccagaggacgcagacgagaggcagaggacagaaggaacagag

SEQ ID NO: 254056 - RNA, 77 nt, Homo sapiens
cacccagccacacgcggagaagaggcccccagagcaggagcaggaaaaaaacagacgggaaaaacaagccgaaccag

SEQ ID NO: 254057 - RNA, 80 nt, Homo sapiens
gccggaggaggagcccgcccccagagaggggagccggcgaggacaaaaccgaaggagggcgcaaagggccacaggcaagc

SEQ ID NO: 254058 - RNA, 76 nt, Homo sapiens
cgcaccccaccgccaacccacggcgagcccgggcgcgccaggcacagccaagagcggaccggcagcggccagcgca

SEQ ID NO: 254059 - RNA, 77 nt, Homo sapiens
agagcggggcaagcacagaaaagaagcaacagaagaagaagcagagggacaaacccaggaaggaggacagaaggacc

SEQ ID NO: 254060 - RNA, 69 nt, Homo sapiens
gagcccaggagcgccacgcgcggaaggcagcgcccagcagcgcagccgaaaagacgaggcgaggaggcg

SEQ ID NO: 254061 - RNA, 50 nt, Homo sapiens
aaggaccaagaaccagggacggaaaaggcgcacacgacccggagaacccc

SEQ ID NO: 254062 - RNA, 76 nt, Homo sapiens
gaagcacgagcagaccggcccgaccgcccacagacccaaacaaaggcgggagacccccagacaggccacccagaag

SEQ ID NO: 254063 - RNA, 72 nt, Homo sapiens
ccagcagcgggcgcggaaacgacggccccccgcccagaaggggaacaaagcagaagccagaaaccgcaaaac

SEQ ID NO: 254064 - RNA, 79 nt, Homo sapiens
acaagcggaaaggacacagaccccaaggaagccgggcacaggcggagagcccaccaacagccacggcacccccacacac

SEQ ID NO: 254065 - RNA, 72 nt, Homo sapiens
cagaccagcgaaccgggacacaggagaaagagagcacaaagcacacagagaaaaaaagggaacaaaacacag

SEQ ID NO: 254066 - RNA, 74 nt, Homo sapiens
cggcgcggagagggggcgcgagcggggcaaccagccaagggaccgcagggagacggcaccaccaccggggggcc

SEQ ID NO: 254067 - RNA, 67 nt, Homo sapiens
aagaaacaaaaaaaggaaacacacaaacgcagaaaagcaaacgccagcagaccacacccagacacag

SEQ ID NO: 254068 - RNA, 76 nt, Homo sapiens
cgggagcccggcacgagcgccgacaacccggcgccagagccggcgacaccccaagagggccgccaccacgaggagc

SEQ ID NO: 254069 - RNA, 71 nt, Homo sapiens
cgagccaagcaggaaggcccagcaaagagaagaagaccccagacccgcagagaccgcgcgcaaacgaagga

SEQ ID NO: 254070 - RNA, 96 nt, Homo sapiens
gcgcgggagcccgggcaccagagcgacgggcaggaaggagggggcgcacaaacgagggggagaggcaccagcaacagaccaaccgcagcaagcaca

SEQ ID NO: 254071 - RNA, 75 nt, Homo sapiens
gacagaacgcccgccgggccccagaaagacccgccgaaaaagcgagacaggcggccgggcaaagggcagcacccg

SEQ ID NO: 254072 - RNA, 65 nt, Homo sapiens
ccagaccaaggaagaggcgaacaagggccccacccgaagaaggccgggcagagagggagcccccg

SEQ ID NO: 254073 - RNA, 74 nt, Homo sapiens
ggcgagaagaacagccaccggaggaggagagaaagaaagccagcgcaacgagagaaccagcagaaaagaagccc

SEQ ID NO: 254074 - RNA, 77 nt, Homo sapiens
gagaggccgcaaaggccggcaggccagacgccccgcgccggagccggacaacaaaacggcggcaggagacacggccc

SEQ ID NO: 254075 - RNA, 56 nt, Homo sapiens
cagccgggaacccccacgcggccagcgaaaacgcccagcccagaggccacgggcca

SEQ ID NO: 254076 - RNA, 80 nt, Homo sapiens
ggaccccaagaagaccacagagggacccggacaaccagaggcagccagcagggggagcagagcaccaaacaggggggaag

SEQ ID NO: 254077 - RNA, 75 nt, Homo sapiens
gcagacacccaacggggaaccccagcggcggcggcacagcaaacacacaagagccagcaaagggagcagcacaga

SEQ ID NO: 254078 - RNA, 62 nt, Homo sapiens
gaaacgaggaggagaaacgcggccgggccgaggccggacggagacagagacagagaggcaaa

SEQ ID NO: 254079 - RNA, 82 nt, Homo sapiens
cagaggaggaaagcagcaaggacagaaagcagccaaccagaaaagggagcgagcggaaaacagggagaagaacgaaagcaaa

SEQ ID NO: 254080 - RNA, 89 nt, Homo sapiens
cagggccccgccccgccccggggaacccgcagaggacagaagaggccaccaaacccgagggcggaggcagcggcggaccggccacgcaa

SEQ ID NO: 254081 - RNA, 79 nt, Homo sapiens
caacccgcgaaagcaggaaagggcaaaagcggcaaagggaaaaaggcggacgcaaaacgggagagcagagagagagcac

SEQ ID NO: 254082 - RNA, 82 nt, Homo sapiens
aggccccaaggacgaggaagggaaggcccaggcgccaggagcaacacacaaacacaaggaggaaggagcccacaccagcccg

SEQ ID NO: 254083 - RNA, 75 nt, Homo sapiens
acaggcccaggggcgagccacagcgaaaggaccgcgcagacgcgcaggacggagcggggccaggcggccaggacg

SEQ ID NO: 254084 - RNA, 84 nt, Homo sapiens
acgccgagcgacagcccgagggggagggagaggaaacggcgagggaaagaggaaccgcgcgcggccgaaccaagcccgggcgcc

SEQ ID NO: 254085 - RNA, 81 nt, Homo sapiens
gacgagacacacggcacacaccagcaggcgcagaacgagggacaaagagccaagaggaaggaagcccaacaggagaaaaac

SEQ ID NO: 254086 - RNA, 85 nt, Homo sapiens
caccagccccccgagcccagaagcaggcaccccgcaggcccaggagacaccagcgggggcgccgcgcagggaaagggaccgccac

SEQ ID NO: 254087 - RNA, 72 nt, Homo sapiens
cagcaccaaacaccggggaacagcgcccccaggggaaacaggggagcgggacgggcggcgagcggaccgcga

SEQ ID NO: 254088 - RNA, 83 nt, Homo sapiens
agaagaccaacacaccagcgcgggaggcagaccggacgcaagaggggaagagaggaagagcggccacggaggagcagagaagc

SEQ ID NO: 254089 - RNA, 83 nt, Homo sapiens
aaaccaagacaacccaacaaacaaccggagggaggggagcaggcccagggcaaaacagaaacgaacaccgccgagcgcagcga

SEQ ID NO: 254090 - RNA, 83 nt, Homo sapiens
ccgacgacaaaccccaccagccaggagcgcacccagcgcagcaaaacaaacggagagaggagggagaaacaaaggccaaagac

SEQ ID NO: 254091 - RNA, 68 nt, Homo sapiens
agaagcacaacaaaaagggccaaagaagagcaggccaacggcagcggcgaaggagaccgcccaaacca

SEQ ID NO: 254092 - RNA, 112 nt, Homo sapiens
cagcccgccacccagagacacccccgaaaccacccccaggggagaggaagccaggcggagacccggacgacgggccaggccggcaccccgggggccagggccacggggaacc

SEQ ID NO: 254093 - RNA, 54 nt, Homo sapiens
gaacgaaacggagccagagaaggcagaagaaacagacgcacgccgaaaaaaaac

SEQ ID NO: 254094 - RNA, 96 nt, Homo sapiens
gcgaaacgaggaggagaaacgcggccgggccgggagaagcccaccacgcaacgggacggcgcggcggaaggcgcgccagacgagccacgcgccaca

SEQ ID NO: 254095 - RNA, 73 nt, Homo sapiens
agaagacagccgcaaccaaagacgacgaaaacacaccagacgggagcccaagggagccaaggcgacagaacag

SEQ ID NO: 254096 - RNA, 73 nt, Homo sapiens
gggaaaggagcccagggcggagagggaaaggaccgcagaccccagaggccaggggccagcaaccaggagggag

SEQ ID NO: 254097 - RNA, 71 nt, Homo sapiens
caccgggagaagcccggacggaaaacggcacgaaggagccagcaccagagccggagagacggagcacaaag

SEQ ID NO: 254098 - RNA, 67 nt, Homo sapiens
gcgcgaccggccagcgccgcgacgggaggagcgccggaacgccgaggcccagccaccgggcccaggc

SEQ ID NO: 254099 - RNA, 42 nt, Homo sapiens
agccaaagaccccacggacccgcaggcccgggcggaggagga

SEQ ID NO: 254100 - RNA, 85 nt, Homo sapiens
caccacacgcaaagagaagaagggggaaaaagggaccgcgggccaaaagcaaccgcggggggaacccgaggaaaaacgaagcgag

SEQ ID NO: 254101 - RNA, 61 nt, Homo sapiens
agcgccacaagaacagcgacaccgcccccgccaggagggagccggaaacaaagaagaggag

SEQ ID NO: 254102 - RNA, 76 nt, Homo sapiens
agaagagagcacagacgcccagaggggcaacggaggggccaggcacgggacggaagggagccgcgccgcgaaaccc

SEQ ID NO: 254103 - RNA, 56 nt, Homo sapiens
cccgcccccagggccagcagaggccacggggggagcggggcgcgacgggaccaaga

SEQ ID NO: 254104 - RNA, 39 nt, Homo sapiens
gaggcaggccaaagagaggccagcccagaacaaagcagg

SEQ ID NO: 254105 - RNA, 58 nt, Homo sapiens
ccgccgaggagcgacgcaccgcaggaaaaacgaggcaaagaggaacgggaaaacagcg

SEQ ID NO: 254106 - RNA, 95 nt, Homo sapiens
cgagggcgcccacggaggcagaccgaggggaccgggcgcggaccaccgacccgcccgcccgacaaagagagaagcggggaagaaagcaaaagcag

SEQ ID NO: 254107 - RNA, 81 nt, Homo sapiens
gcggggacggccacagaaagcagcccaccagcaggcgggacccgcaccggaaggccacgccaagccccgggcaaggggagc

SEQ ID NO: 254108 - RNA, 79 nt, Homo sapiens
gccagagcccaaaccccaggccaagcagccaccagcagcccccagagcgggaccacagaggaaaacgcgagagagacgc

SEQ ID NO: 254109 - RNA, 74 nt, Homo sapiens
acgccgcgccgcgcgcgggcccgcacagacgccgcgggccccagcgcaggcaaaaaggacaggggaaaaggagc

SEQ ID NO: 254110 - RNA, 78 nt, Homo sapiens
ggaagccacgcccggggcggacaccgagacagacccagcacggaccccccccccagccgggcgaggccccgaaacgca

SEQ ID NO: 254111 - RNA, 69 nt, Homo sapiens
ggcgcccccagagccaacgaccaccaccccgggacccagggccaggagccaggcacagcagggaccaga

SEQ ID NO: 254112 - RNA, 83 nt, Homo sapiens
agggagcgcgggggcccgcgcagcagcgaccacggcccgcccgggagaagcccgccacacgcggcccacgcgagggccgcgca

SEQ ID NO: 254113 - RNA, 69 nt, Homo sapiens
cggaccaagaaccaaacgaccgacaccgcaagaccccgaagcccaggggcaagaaccgaagcaaaagag

SEQ ID NO: 254114 - RNA, 114 nt, Homo sapiens
gggcgcgagagcgagcgggcccgggaacggcgcgggggagaggaggagccgcgggccgacagcgggacgagaagaagccaccgggcaccggccgagggcggagcagcgcaggag

SEQ ID NO: 254115 - RNA, 82 nt, Homo sapiens
acgcagccagcagaagcgagagcgagccagggaggcggcccccagcagccagagggaaggacaggagaggggcccaccccag

SEQ ID NO: 254116 - RNA, 76 nt, Homo sapiens
cgcgggaccagccagggggagccccgcagagaggccgaaggaaaaaggaagcggacaaagcaaagaaaacaacagg

SEQ ID NO: 254117 - RNA, 79 nt, Homo sapiens
aaagaacagaggaccgcggggacgggagacccaccagccgaaacaaaaaaacgagcaaaggcagaaaaaggaacggaac

SEQ ID NO: 254118 - RNA, 75 nt, Homo sapiens
gcgccgacccaaccccagagacagccaccgaagagccccccaccgaacggagcagggacaaaccccacaaggagg

SEQ ID NO: 254119 - RNA, 77 nt, Homo sapiens
ccccggcccacaggggggggcaaacccgagagaacggccagccaagagaggaggagagaaggaacgcagaagccagg

SEQ ID NO: 254120 - RNA, 76 nt, Homo sapiens
cacgggaaaacccggacaaaggagccaccaagagcccgacggagcagcagcgccgggaaggaaagcacacaggaca

SEQ ID NO: 254121 - RNA, 95 nt, Homo sapiens
gcaggcccgagcccaccgcgccgggccccggacgccgcgcggaaaagagcccaaacgagaaggaagccgcggaggaccgagcgcacagacaacca

SEQ ID NO: 254122 - RNA, 83 nt, Homo sapiens
gcgggcgcgcggagcggcgccccgcagccgcggaccgaggcagcggcggcaccgccggccgagggagacgggcgaacacaggg

SEQ ID NO: 254123 - RNA, 53 nt, Homo sapiens
gcaacgcacacaacagcagcagggcaccagggcaggggacggaggccaaacac

SEQ ID NO: 254124 - RNA, 72 nt, Homo sapiens
ggggacaccgaagaagagcggcggaccaccggagaagcacaagcagcacacaaggcacacagagaaaaaaag

SEQ ID NO: 254125 - RNA, 80 nt, Homo sapiens
acagcagggaccacccccagcacccccgagaggaaaacccaagacaaggaagggcaaagcccacagcacaagaggcgggc

SEQ ID NO: 254126 - RNA, 60 nt, Homo sapiens
ccggccggaggcgggcgggggcgacagggccgaccggaggggcgccacaggagccgcaga

SEQ ID NO: 254127 - RNA, 75 nt, Homo sapiens
gaccccagcgggggaagaaggacaagaggccagggcagggcccagaagaaagagaagagcgacaggcaagcggaa

SEQ ID NO: 254128 - RNA, 101 nt, Homo sapiens
gcccggcgccagaagaacaagccacagcaagaaggaaagacagaggccaaacggaagagcagcccagaagacagaaaaagagagaagaagagaagagaaaa

SEQ ID NO: 254129 - RNA, 64 nt, Homo sapiens
aagcagaacgccgcgaagcacccaaagacaccacaagcgaacccaagggggcggaaagcaaaga

SEQ ID NO: 254130 - RNA, 79 nt, Homo sapiens
cgagcaccagccgggacgcggggaccggaacaggaaagaaaacgagccgaaaacagaagccagcgaaagcgcaacgccg

SEQ ID NO: 254131 - RNA, 71 nt, Homo sapiens
aagcagcaaggacgaaaaagggcagacacaaggaacagccagccaggagaaaaacgaacccaacagaccac

SEQ ID NO: 254132 - RNA, 75 nt, Homo sapiens
ccccccgcaaccgaaggaggcacccagccacaccaggacacccccacacgagccccaaccccccagaccaaacac

SEQ ID NO: 254133 - RNA, 77 nt, Homo sapiens
accaggaggaagacggcgaaggcccagcgcgagaccgaggcacgggcaggcacagcagaccagaagcagcgagggga

SEQ ID NO: 254134 - RNA, 79 nt, Homo sapiens
ggaaacggccacaagagggcagagaccgcgccacagccggggggaaagacagcggaacagagaggcacccagacgcccc

SEQ ID NO: 254135 - RNA, 80 nt, Homo sapiens
gcccccagagcgggacacaggcaccagacccggaggagcagcaccccggcaggcagaccagccggcccccaccagccaga

SEQ ID NO: 254136 - RNA, 59 nt, Homo sapiens
gaagaagaaaggacgacagccagagagccaaggccaccgagccacaagaccacagcacc

SEQ ID NO: 254137 - RNA, 83 nt, Homo sapiens
cacacacaaaagcacacaaagaccccccccacaggggagacagaggaaagacaaggccccagcagcaggcaaagggaaggcac

SEQ ID NO: 254138 - RNA, 75 nt, Homo sapiens
aacccggggagaaccacggaaaggcagcaggcggaggccacaggaaacgaaaacaccacgacgaagacgggagaa

SEQ ID NO: 254139 - RNA, 78 nt, Homo sapiens
gggaaaggaccaccacaggaaagaaggccacagaccccaccagcacgaagggacacgggggcagaaaaccaaccaagg

SEQ ID NO: 254140 - RNA, 64 nt, Homo sapiens
agaggaaaaaagaaagagaaaaggaaagcagaagacaagcaggacgaacgagagccaacagaag

SEQ ID NO: 254141 - RNA, 84 nt, Homo sapiens
ccgagccaggcaggcaacaagccagccacccacagcaccaaagagcggagaagggggacccggcccgaggggccccgcggccgg

SEQ ID NO: 254142 - RNA, 71 nt, Homo sapiens
cgcaagggaggacaggaaaaaggaaaacaggcaagaccgcaacccaccaaggagcacaggacgaagaggaa

SEQ ID NO: 254143 - RNA, 69 nt, Homo sapiens
gggaccgagaacggaggacaacaccaagcaaggaagcagggcaaaaggcaaccggccagccgacaggcc

SEQ ID NO: 254144 - RNA, 71 nt, Homo sapiens
ggccgcccgggccacgcccccccagggcccaggcggaccgccccggaaggcaaaagcagaccggaaaaccc

SEQ ID NO: 254145 - RNA, 63 nt, Homo sapiens
caccacacccgaagcaagaagaaaggacacaccaagggaaacgaagaagagcccaagagaacg

SEQ ID NO: 254146 - RNA, 37 nt, Homo sapiens
ggagggaaagaccaggcaggaaagagagacgacggaa

SEQ ID NO: 254147 - RNA, 76 nt, Homo sapiens
aggacacgacaagaacggggaggggggacaggagagaagagaggaacgaagggcaccacgacaaaccaagacgaca

SEQ ID NO: 254148 - RNA, 79 nt, Homo sapiens
cccaagcgaaccggcggcccccacccggacaccggaagcagcgagcgcagcgccacggagacaccacaacgagagccaa

SEQ ID NO: 254149 - RNA, 52 nt, Homo sapiens
aaggggagaaggcaggcaccacaaaaaggacaggagaaagggcgggaaagcc

SEQ ID NO: 254150 - RNA, 79 nt, Homo sapiens
acgcaaggcaggaaggaacggagaagcggccacagagggcgcccaacagcagaggaacgaaaaacaccaggcagacccc

SEQ ID NO: 254151 - RNA, 89 nt, Homo sapiens
aacaggggccagggaaaggagcagagagagagagcagaaggccgggggagcacccagaacagcagcaaggcaagaaaggcaagggaaaa

SEQ ID NO: 254152 - RNA, 85 nt, Homo sapiens
gaacgcggcgcaagcgacgaagaagcgaaagagcgggacgccgggaggcagagaaggcagcccagacgcgaacggcagaccagga

SEQ ID NO: 254153 - RNA, 56 nt, Homo sapiens
agaggacaaccaagccccagaaccagcacgggaggaagggaccagcaagacagaag

SEQ ID NO: 254154 - RNA, 80 nt, Homo sapiens
cggagaaggcggaagggaggggcgacgagcgcggggcccgaagccagcagagagcggaggcgcaaaccgagccacagaga

SEQ ID NO: 254155 - RNA, 83 nt, Homo sapiens
gcagggcaccgcgcgaagcggccaaagccgcccagacggccaccggcgggaggaacaaaaggcaagaacggaagcacgggcgg

SEQ ID NO: 254156 - RNA, 85 nt, Homo sapiens
gagcgggaggccacagcagccagccggcccgaggacaccgacaccagcaggggacagaccagagcaggaccaaaggcgcacagag

SEQ ID NO: 254157 - RNA, 74 nt, Homo sapiens
cgacgaccaggaagaacggagcacgacagaaacacagccgcagagaacaggaacaacccagacacccgggccag

SEQ ID NO: 254158 - RNA, 74 nt, Homo sapiens
acggcgcccggggaaccgcgcacggggcccaccagccgcaccaggcaaagagagggggagccggcgcacaagca

SEQ ID NO: 254159 - RNA, 95 nt, Homo sapiens
gaagaccgaggagcgagcaggaagaaaggacagacaagaagagagagagggccgcaaaggcccacaagacagccacaacaagagaggccacgcaa

SEQ ID NO: 254160 - RNA, 84 nt, Homo sapiens
agcaaaaacaacagggacgaaaaaagacaggaacgccagcgccggagaccaccgaaccgggccgaaacagccgggcgaggggga

SEQ ID NO: 254161 - RNA, 68 nt, Homo sapiens
gaaggaacaacagcgggcaaaccagaagacagaaggggaacgaaaaaccggaaacggaaaacggagaa

SEQ ID NO: 254162 - RNA, 68 nt, Homo sapiens
ggcacggggccaaaaaggcacgagggaacgggaaagaacagagaagcgccgaacaaagcaagaagcgc

SEQ ID NO: 254163 - RNA, 70 nt, Homo sapiens
gggcagaaaaagcacacaccacgcaacggccagggcacaacaaagaaaggccaagccaaacggaaagaaa

SEQ ID NO: 254164 - RNA, 52 nt, Homo sapiens
aggacgacgcgacacaaacaaaaggaaccccagaacagacagaggggacagc

SEQ ID NO: 254165 - RNA, 78 nt, Homo sapiens
cggacccgcccgccacgccagcgcgcacacccacaaggcaaaacagcaaggaggccgcgacagccaccaaagcagcgc

SEQ ID NO: 254166 - RNA, 73 nt, Homo sapiens
gcaacgcggcgggcgagacgccagaacacgaccagcgcgaccgcagccccaaggccaaccgccaggaagcgcg

SEQ ID NO: 254167 - RNA, 76 nt, Homo sapiens
ggcgccagagccggggacgaaagggaaggacaggcagagcaaacaaggaaagaaacccacccagccaaaaaggaaa

SEQ ID NO: 254168 - RNA, 72 nt, Homo sapiens
agggacgcagacggagagaccaagaaaaggaaccccgacaccgaacggccgagcgaccaggagaggagcccc

SEQ ID NO: 254169 - RNA, 66 nt, Homo sapiens
caccccggcagacaggcaaaggaacgcgcgacgagggcagaaggggagaacgagccaccagggcgc

SEQ ID NO: 254170 - RNA, 85 nt, Homo sapiens
gaagggcaccacgacccgaaggcggagcagccgagaacgagccaaccagggggaagaagagcgcaccgaaggcacaagggaaacc

SEQ ID NO: 254171 - RNA, 80 nt, Homo sapiens
gggacccacacgggagagcagacacccaaaagcggaccaagaaaacacggggaagagaaagccaaaaagaagccaacaag

SEQ ID NO: 254172 - RNA, 78 nt, Homo sapiens
gcaggaggcgagaggggcagaggcccgagaaggagacccaggagaacaaacggggcagggccggagcgagggagagca

SEQ ID NO: 254173 - RNA, 70 nt, Homo sapiens
gcggcagaagacccggaagcaaagaaaaagaacccaaacaagacgcaagagaacaggacggacggcacac

SEQ ID NO: 254174 - RNA, 94 nt, Homo sapiens
gccacggcgggccgcgggaggacaccacccacagaccgaggaggagaaggggcggcccggaggccgagaggagcggagagacaagacgaagccc

SEQ ID NO: 254175 - RNA, 80 nt, Homo sapiens
ccgccccccgcaccaccagcagccaggaaccaagaccaggcaaaagaaaccaccgacgaagcccgagacagaccagaaaa

SEQ ID NO: 254176 - RNA, 66 nt, Homo sapiens
ccgggcccgaggaggcagccaagccaggccgccacgcggcacaggaggcgacgcagagaccaggcg

SEQ ID NO: 254177 - RNA, 76 nt, Homo sapiens
agagccaggcgggagcgggaagcgcaccggagcagggaggcaggaagagagaagggcacagaccaagacaacgaac

SEQ ID NO: 254178 - RNA, 73 nt, Homo sapiens
agagacaacacacaacagaagacaagggcccggggacacgagcggccccagcgcccgcacaaggcacaccccg

SEQ ID NO: 254179 - RNA, 86 nt, Homo sapiens
cccccgacaaacaccacgagaaccgcagcccacacggcgccacggccggaacgcacagcggaaggccgccacccgggccaggagcc

SEQ ID NO: 254180 - RNA, 53 nt, Homo sapiens
cacacgcggcaaagagcgcaagcacagggcaaggccccagagcaaggaaaaga

SEQ ID NO: 254181 - RNA, 77 nt, Homo sapiens
gacgaagaaccccacaggggccagcaggaaagaccacagcaagaccacgcccccagccgggggaccaggccgaacga

SEQ ID NO: 254182 - RNA, 85 nt, Homo sapiens
ggcgccgccgcgccgccgccaccgcggccgagaccgcgcagccggcggaaagccaacaggcagaccagagacagcgccacgcacc

SEQ ID NO: 254183 - RNA, 75 nt, Homo sapiens
aaggacacgcaaaccaccaagaagcgccagccccagccaagcaaaggccaccgcccaagaacggcggcccaggag

SEQ ID NO: 254184 - RNA, 75 nt, Homo sapiens
ggagcacagaagagcgaggagacacgggaacgcccgaccggagagaaagccacagacacggcagccaccacgccc

SEQ ID NO: 254185 - RNA, 79 nt, Homo sapiens
gaggcagaggcacaccgaaaggagaaagacagcaaagaaaaggagaagaaaggaaaaaaacaaccccgggcaccccgcc

SEQ ID NO: 254186 - RNA, 78 nt, Homo sapiens
caagcaggacaaacagcacaagagcggacaagggcagaaaacaaaagcagcaaaagccaacgcacaggccagcgaaaa

SEQ ID NO: 254187 - RNA, 77 nt, Homo sapiens
aacgacccaacagcaaaggacccccacccacccgagaacagacaggacaacagaaaaacacacacagggggaagaac

SEQ ID NO: 254188 - RNA, 75 nt, Homo sapiens
caagcggagggacagcaagcgcccccgggaaacccacgaccaggcccaccagaacaggagcagcaccagggaccc

SEQ ID NO: 254189 - RNA, 84 nt, Homo sapiens
cgcccgcagccagggcgggggggaggcgcccccgacccaccgagggacggcccgggagcggggcccggcgcacccaccaccgcc

SEQ ID NO: 254190 - RNA, 71 nt, Homo sapiens
cgccgcacaaaaagcagagaggaggagagaaagaacccacgcaggacgacagaagaggccggacaagagaa

SEQ ID NO: 254191 - RNA, 61 nt, Homo sapiens
ggaaagaggcacacccagcccgagcaagccgaagcccagaacacacaacaccagggaggaa

SEQ ID NO: 254192 - RNA, 77 nt, Homo sapiens
gcccaccaaagaggaaagcgaggaggagcgagcgcgagaggcggacaagaaccgcaagagcgaggacccagcacaca

SEQ ID NO: 254193 - RNA, 77 nt, Homo sapiens
ggccacgaggaggggggaccagaagccaggagaggcgccgggacgggcgcacgccacgcaagaccaacacgcacagc

SEQ ID NO: 254194 - RNA, 87 nt, Homo sapiens
ggaccccgggaggcgaggacggccgccagaaaagcaggacggggcacgagggagaggccgagaagaaacagggaacggagcccgcaa

SEQ ID NO: 254195 - RNA, 82 nt, Homo sapiens
ccagcggggaaacagggagaaacaaacaccagaagaaaagcccacccacaagaccagacaaggaggaacaccgcaaaaccaa

SEQ ID NO: 254196 - RNA, 67 nt, Homo sapiens
cacacaggccaggacagcaccacacacacagagaaacaacagccagaaaacacaaggacaaaggcaa

SEQ ID NO: 254197 - RNA, 77 nt, Homo sapiens
gaaaaaaaaaggagagaagcgaagcagccaaagcaggggcaacccagaacccccaggacaggggcggcagccgaggc

SEQ ID NO: 254198 - RNA, 78 nt, Homo sapiens
cgccgcgcgcccgacgccccgcgggaccccccgccggaccccacagcaacaagaaaacaacccgcgcacagaagggag

SEQ ID NO: 254199 - RNA, 71 nt, Homo sapiens
ccagcgagcggggcgcgcggccggcacaaggccaagacggccaagggagccacagggcccagagcacggaa

SEQ ID NO: 254200 - RNA, 74 nt, Homo sapiens
gacacacacgaccaggacaagcgccccaaaccagagccaacacacggagcacagagagacccaagagaagggcc

SEQ ID NO: 254201 - RNA, 79 nt, Homo sapiens
acgggggcccgcgaggcgggcagccggggcgccagaacacgagaccgcgccccaggagcggccgcgcaccgccaaagac

SEQ ID NO: 254202 - RNA, 47 nt, Homo sapiens
ggagagcgcaagcccagcgggacagaaaaggaaggggaaccacagca

SEQ ID NO: 254203 - RNA, 54 nt, Homo sapiens
ggagcccgcacgcggcgggcagacaaagagagaagcggggaagaaagcaaaagc

SEQ ID NO: 254204 - RNA, 70 nt, Homo sapiens
ggagcagcaagccgagagcaacgggcgaaaaacgaagaaggaagacgcgaccgaacaaacagccaaaacg

SEQ ID NO: 254205 - RNA, 87 nt, Homo sapiens
ccagggccccgaacccccagagcccccggagggaaaggccacaagaggaagcgaagaagaggacgccgccagcgagccagcagggag

SEQ ID NO: 254206 - RNA, 74 nt, Homo sapiens
cagggacagaccaccaaaagcccagcagagcacacgggccggcgagcgcggaggacgagaggaagacgaggaag

SEQ ID NO: 254207 - RNA, 66 nt, Homo sapiens
acacgaagaacaagaaaaagcacaagagcaccaacgaggacccccgagcccccagccggacccccc

SEQ ID NO: 254208 - RNA, 73 nt, Homo sapiens
ggagggcgcggcacgccggcccgcagccaagaggcgaaaacagcgaaaggaaacagacagaaaaacggcgcga

SEQ ID NO: 254209 - RNA, 70 nt, Homo sapiens
ccgggaccggcgggccgcccagccgagaccaccgcagcccaccccagggaccaggaggagaagcaaccag

SEQ ID NO: 254210 - RNA, 75 nt, Homo sapiens
gagaaagcgggagcacgccggcccagcccaaacgggcagcgaagggagaagacagcacggggagcccacaggcca

SEQ ID NO: 254211 - RNA, 68 nt, Homo sapiens
agagggcagggggcaaacaagccgaccggaaaaagggggcggaacaggaacggggagccgcgaaaaaa

SEQ ID NO: 254212 - RNA, 75 nt, Homo sapiens
gaggaggacccgcccagccccggaaaggggcaggaacgacaaaccaaagccagacgaagagagaaaggcagggca

SEQ ID NO: 254213 - RNA, 79 nt, Homo sapiens
ccgacgccaggcagcgcccccaaacggaccccagccaggccacggggacaacaggcagcagcgcagcgcacagaggaga

SEQ ID NO: 254214 - RNA, 77 nt, Homo sapiens
caacgccacccccagagcaggagaagcgagcccggacagaccaaccgcaggcgcaagcaggcccaacacgcaaaaga

SEQ ID NO: 254215 - RNA, 62 nt, Homo sapiens
caaaaacgcaacaacagacgccaacagcaggcaggggcgcacccagggacccagaggggggc

SEQ ID NO: 254216 - RNA, 75 nt, Homo sapiens
aacacagagccccgagccggggcaaacaggaaccagcgaaaggaaaccagggcacagaacacaccagaggcggac

SEQ ID NO: 254217 - RNA, 66 nt, Homo sapiens
aggggccccgaacaccggagcaaggggaaaccgacgccaagacgaaaccgggggaagcgacgagac

SEQ ID NO: 254218 - RNA, 73 nt, Homo sapiens
acaaggcaacagaaagagcaacagcagggcaacagccacggaaacagaagacaggaggagggccagcacggag

SEQ ID NO: 254219 - RNA, 74 nt, Homo sapiens
caaacccccagacaagaacacaacccaaacccgcccgaccaagacggacagaacaaaggggggaacaaacaaac

SEQ ID NO: 254220 - RNA, 63 nt, Homo sapiens
aggaaagaggaggaagccaagcaccgcagagaaaagggaggggggaccccgcccagggcccag

SEQ ID NO: 254221 - RNA, 77 nt, Homo sapiens
cccacaccagaggaccaagagcagccagaggaccacgacaagagagagagcacagccaggagcagcaaaggaacgac

SEQ ID NO: 254222 - RNA, 77 nt, Homo sapiens
agcccggacccgcaggccacacgggcggggagcgcccacgccaaagggcgccggccgagcccgggaaaacgacagca

SEQ ID NO: 254223 - RNA, 63 nt, Homo sapiens
cccagacggcacaccaggacgggcgacgccgaggaggcgaggcgggggcgaacgccgcagagc

SEQ ID NO: 254224 - RNA, 75 nt, Homo sapiens
agaaacccacaccgccgaggcaccgaaggcaggagggacaggcaagaaggaagaaggcagaggcgcagccagggg

SEQ ID NO: 254225 - RNA, 86 nt, Homo sapiens
gcagaaaaaccagacggaagcgacgacggcaggaagaaaacgagccaggaacaaagagcaagaaacggcgaggaaagagaggagcc

SEQ ID NO: 254226 - RNA, 70 nt, Homo sapiens
aaacaaaaaggccagaaagaggagcagagacgccggacagggcccgggacgagcggcccagcgacgagcg

SEQ ID NO: 254227 - RNA, 45 nt, Homo sapiens
gcccagaaagcgcagccaggcggccagaaccagagaacagcagag

SEQ ID NO: 254228 - RNA, 75 nt, Homo sapiens
acagaggagccgaacaaacagaagcacagacggaaaaaagaagacaaagcccaaaaggagccagcaccgccgacc

SEQ ID NO: 254229 - RNA, 85 nt, Homo sapiens
aagaggccgaggagagcccgccgagccaggacaaaaccaggcagaaccaacacgaacccaagcacaaacaagaaaacgagcaggc

SEQ ID NO: 254230 - RNA, 77 nt, Homo sapiens
ggcagacagggcaccacacgacccccgaccacaccccagaggcagcgaaaacacacggggcgaaaggcccgagcgag

SEQ ID NO: 254231 - RNA, 109 nt, Homo sapiens
gaaggggacagaaggagacggaacgcacagaggaacgagcgagcggcagagcccaggagacgacaaggcgggcagggggagcggcgcggcagagcgggcaggagaggcc

SEQ ID NO: 254232 - RNA, 79 nt, Homo sapiens
gccaggcgggcgcggcggcgagaaggcggacccagacagcgaccccagagaagaaggagaggacagccgcagacaggag

SEQ ID NO: 254233 - RNA, 62 nt, Homo sapiens
cgggaaaagagaacaagaacacacaagacaaggcagggagccaggagacggaagaccaccaa

SEQ ID NO: 254234 - RNA, 70 nt, Homo sapiens
agggccccgcaccagcaacccaccagaccacgaaaaacacacaacacgacgcagaccccaaaaggaagag

SEQ ID NO: 254235 - RNA, 80 nt, Homo sapiens
ccgcgcgccgcgcgcgcgcccacaccgcgcccagacgacccccggcggagacaggccccacagagccacgcgcgggcacg

SEQ ID NO: 254236 - RNA, 81 nt, Homo sapiens
gcccaggcggacacgcggggaacgggggagcagcaccaaggggggccagcggaaacaggacacagaggggggccagccggc

SEQ ID NO: 254237 - RNA, 77 nt, Homo sapiens
ccaaacgagagcagccaacggggggaccaaggcaacgaacacaagcagcgggcaacaacagaacagaaaacaccgcc

SEQ ID NO: 254238 - RNA, 67 nt, Homo sapiens
ggggaggaaaaccgacgaagcggcagacagagcaagagagaggaggaaaaaaaggagcgacagaaga

SEQ ID NO: 254239 - RNA, 56 nt, Homo sapiens
cgcgaaacgcacgagaaggacacgcgaagaggaagaaacgagaacggcaaaaggaa

SEQ ID NO: 254240 - RNA, 78 nt, Homo sapiens
caacagaagaggagagaggaacccgaagaagaaaggacgacagccagagagggcgggacgaccccacaacccgagcgc

SEQ ID NO: 254241 - RNA, 91 nt, Homo sapiens
ccagcccgaaacaccaccaaggcggaagcccggccgcgcaaaacgggcggcccgcgcggaggccgcgagaccgcagaaggagcggagcggc

SEQ ID NO: 254242 - RNA, 55 nt, Homo sapiens
gcccacaagaacacaaaccaggcccaggggagcgaagccaagaagcagaacagaa

SEQ ID NO: 254243 - RNA, 78 nt, Homo sapiens
ccgccagcagggccgaccaggaccaaaagcgacccaagaagaaaggaaaaaccaagcggaaggagagagaagcccaag

SEQ ID NO: 254244 - RNA, 68 nt, Homo sapiens
cgaagggaagccagggaagcacagcaaccacacggacccggagaaaacccacaagaacccaaaccgag

SEQ ID NO: 254245 - RNA, 74 nt, Homo sapiens
cgagccaaggggaggcagaggaccccacgcccccagaagccgcacaggaggaggagcaaagacaagaccaacag

SEQ ID NO: 254246 - RNA, 72 nt, Homo sapiens
ccgcaaggaagaggccaggcaggaaccagcaaggaaaccccagcagggggaggggagcacgcggcgacaggc

SEQ ID NO: 254247 - RNA, 84 nt, Homo sapiens
caggagccgacgacccggaccaagaaggggaggcccgcggcagacggccagcccccaggaaagagaaaacagcaggaggaagaa

SEQ ID NO: 254248 - RNA, 77 nt, Homo sapiens
cggacccccgaccgccggccggccccagcccaggccagcggaccccagggaagcacacccgggccgggaccaggacg

SEQ ID NO: 254249 - RNA, 69 nt, Homo sapiens
gaagagaacgcccgagccccaacccacgcgccccaaggcgcagggagcaggagaagcggagcgaagggg

SEQ ID NO: 254250 - RNA, 86 nt, Homo sapiens
gaggcagaaaacggacggaagaaaaggcggccggaagcggccagccccagggcagcacacagagacaccaggaacacagccacccg

SEQ ID NO: 254251 - RNA, 90 nt, Homo sapiens
acagcgagacccggggcgaggacccccgagccaggagacacagcaagaaggccccaccagagcgagcagagccggcaccagccgggaccc

SEQ ID NO: 254252 - RNA, 61 nt, Homo sapiens
gcccacggcgcgaggggcgcagcggggacagagagaggcagaagaaaaagcacccccaagc

SEQ ID NO: 254253 - RNA, 83 nt, Homo sapiens
caagcaaaaaaaaccgccccgccagcagaaggaggcggcacagcaaacacacaagagccagcaaagggagcagcacagaggca

SEQ ID NO: 254254 - RNA, 71 nt, Homo sapiens
cggcaaaagcccgccgccccggggacaagaaacagagcaaaaaccggaaaggaaagaggcaagaccggaaa

SEQ ID NO: 254255 - RNA, 80 nt, Homo sapiens
aacacgcggagcggaagacggcaacccagcggagcccaaaaaaccaggcacccaaaacagaagggagaaaaacaaacagg

SEQ ID NO: 254256 - RNA, 77 nt, Homo sapiens
gagcccaacagaccaggggacaacgccacagggaaagccggccagcagggaggagagagcgaggccacccagaaggc

SEQ ID NO: 254257 - RNA, 88 nt, Homo sapiens
gcagggccgggccgccgcgcaccgcagcgccggggcacgacacaaaaacaggacagagcgggagccaccagcgccaaagggaagccag

SEQ ID NO: 254258 - RNA, 76 nt, Homo sapiens
acgacccccggggggcaccgccgggcaccaaggcgaagccgacgagcccgaacagacgcaccagcgggaggaagag

SEQ ID NO: 254259 - RNA, 62 nt, Homo sapiens
ccgcccacaacacaagaaggaaacccaccagagaaggcgcggccacccaggacccgggggag

SEQ ID NO: 254260 - RNA, 77 nt, Homo sapiens
acaccccgacccccgaacccccagcccaaacccggaaacccagcggcccagccggagccggagacacaggccccacc

SEQ ID NO: 254261 - RNA, 88 nt, Homo sapiens
ccaagccgcacagccgcggcggcagcagcaggagaggacaccccgggccaagaggacaacaagaagcgccggccacgccacaccagcc

SEQ ID NO: 254262 - RNA, 76 nt, Homo sapiens
gcgcaccacagcgggaaggagcacaccagaggcagcaccggcgcccgagcccccgcccacagcggccacaccacca

SEQ ID NO: 254263 - RNA, 52 nt, Homo sapiens
ggagaggagcagaggaagcaaaagcagcgcggaaaggggagaacaggaccca

SEQ ID NO: 254264 - RNA, 82 nt, Homo sapiens
gagggggcaagggaccagcaaggcggcagagcaaggggcacgcagaaggaccggccacgacgcgagaaggaagaagaacaca

SEQ ID NO: 254265 - RNA, 86 nt, Homo sapiens
cacagagcccgccgccgaccgccgcccgccacacccgccgccaggcccaccccccaaagccagcagccccagccccccggccaaag

SEQ ID NO: 254266 - RNA, 75 nt, Homo sapiens
ccaagaaacaaaggagaccggccacagacgacaagagacaggagcccagccaccagaaagaacaagcagggagga

SEQ ID NO: 254267 - RNA, 82 nt, Homo sapiens
aaaggcaaagccacaccacaggccaggagccaaagcggacgccggccaccacgaaggcgacacagaagacgagcgacaaaag

SEQ ID NO: 254268 - RNA, 57 nt, Homo sapiens
gcggcagaacaagcgaaggacgggagccgaagccaagaacgaaaaccacacaaggga

SEQ ID NO: 254269 - RNA, 78 nt, Homo sapiens
aaagacgcagaagaaggggggcgccaccccaccagacggccagggagcaagcaccccaaaacagaaaccaaaaaccca

SEQ ID NO: 254270 - RNA, 70 nt, Homo sapiens
gaccaacagccgcgcgggcacaacaggaaaccgggcgccaggccgcaccgcgcacacccagcacaccgag

SEQ ID NO: 254271 - RNA, 71 nt, Homo sapiens
ggggggggggcccgccaacgaaccacaggcgagaccgagacaaggcgaacccaggcacccagagacggagc

SEQ ID NO: 254272 - RNA, 49 nt, Homo sapiens
gcggaggccaggcagcgagcacccagccaccaggcaacccacgaagaag

SEQ ID NO: 254273 - RNA, 77 nt, Homo sapiens
aagaagacggagccaacagcaagggcggcccgccgcacgcgccagcgcggggcaggcaggggcagaaggcgacccag

SEQ ID NO: 254274 - RNA, 78 nt, Homo sapiens
ccgaacccaaaggaggaaacagcggcaagccacagacggccagacagaaaagggagccaggaccccagagaggagacc

SEQ ID NO: 254275 - RNA, 74 nt, Homo sapiens
caaggaggagacaggcaagacggcggcagaccggagaggcgcggcacaggaaagggcggagggaccacagaacc

SEQ ID NO: 254276 - RNA, 72 nt, Homo sapiens
caaggaccgggaaagaggagacaaaccccagacgcgccggagggccagcggaagaccaccaaaagcaggaaa

SEQ ID NO: 254277 - RNA, 74 nt, Homo sapiens
gcagcagcggaaggcagcgggagccgaaaacggaagcccgcggaaacgccagagaaagcggcgcgagcggagga

SEQ ID NO: 254278 - RNA, 75 nt, Homo sapiens
agagcgagaccaggaaagaagggggcagaagaggggggcggcaccaggaaaaagaaagacggcacagaacaaggc

SEQ ID NO: 254279 - RNA, 69 nt, Homo sapiens
gaggggacaaaaccccgaaaaaggcccaaagaccagacacaaaagcacaagggaaaaacaagcaaaagc

SEQ ID NO: 254280 - RNA, 72 nt, Homo sapiens
acggccaggcccaggaggacccccgcaggcagcggcaggaccgaaggacacagcgagaagcggggagcgagc

SEQ ID NO: 254281 - RNA, 77 nt, Homo sapiens
gaaaggccacggaaggaaccaaggagaaaagaaacgaacaggcgagaaagagaccaagacgaaaaagcgaacgcaaa

SEQ ID NO: 254282 - RNA, 56 nt, Homo sapiens
gcagcgcccgggaggacggcagggcccagcaccagagggccggacccccgccggcc

SEQ ID NO: 254283 - RNA, 59 nt, Homo sapiens
cccccagcggggaccgcccgggacaacagcgcggggcacagggcgccaaacagagcaag

SEQ ID NO: 254284 - RNA, 79 nt, Homo sapiens
gccaggcgcacaggaaacgagagcgcagaacccgagcaagagaaaggagagaggacccgaacacggaagaaagacacgc

SEQ ID NO: 254285 - RNA, 60 nt, Homo sapiens
gcgacgagcgacccgggagacacgacgaaaggaagcacgcgcgcggacaagaccagaaag

SEQ ID NO: 254286 - RNA, 55 nt, Homo sapiens
ccagcagcggacaggcacagacaaccagaacgccagcaaacagcagcccccggcc

SEQ ID NO: 254287 - RNA, 65 nt, Homo sapiens
ccaagaggaagcacacagacaggggacaaaagagaccccaggcaacagagaggccgcgccgcggg

SEQ ID NO: 254288 - RNA, 82 nt, Homo sapiens
agccagaagcccaagcagcgaaggacaaagcgacgcaaccacagccggcaagaggacggaaggcccacgccccgaagacaaa

SEQ ID NO: 254289 - RNA, 75 nt, Homo sapiens
gcacccaccacaagccaggaaggagacacggccccccaaggaaaacaggcgggcaccccacgcgaccagccccca

SEQ ID NO: 254290 - RNA, 78 nt, Homo sapiens
ggcgcggccaggaggcacacccgcccgcagaagagagcgaccggagcggggaacacgaccgcgaacaaccacacgaag

SEQ ID NO: 254291 - RNA, 79 nt, Homo sapiens
cacccgcggcgcggggaaaggcgcgagacccagaggccgcggccgcgggagcgagggcacacgagaaacaggcaggaga

SEQ ID NO: 254292 - RNA, 83 nt, Homo sapiens
cggcggccgaagacacgcgacccggagacagcccaaaacccggaagagcgccccaggagaaacaagccacacacacaccggac

SEQ ID NO: 254293 - RNA, 85 nt, Homo sapiens
ggggggccaagagacagggcacaccaaacccacggaccgaaggagaagaaggagaaggggaggagaaggcaagccggaaagagcg

SEQ ID NO: 254294 - RNA, 77 nt, Homo sapiens
cgacgcgcgccgcacggaggcaagaagaaacccaccgcaaagaggaccagcgaagcgcggcaaacagggaaaaaaag

SEQ ID NO: 254295 - RNA, 73 nt, Homo sapiens
gaacgcaccccagagccgacccccaccgcaaggggaaagagggaccagcgcagcagaagcagggagacggcgc

SEQ ID NO: 254296 - RNA, 70 nt, Homo sapiens
caaacggcaagagccagaagcccggcggaagaacgaggaaccccagagaggacagaagccaaccaggcag

SEQ ID NO: 254297 - RNA, 79 nt, Homo sapiens
cgccgaccaagaggaccagacgaagaagaaccaggccgggagaccaccgaggaacacggaggacaacacccccggccgg

SEQ ID NO: 254298 - RNA, 73 nt, Homo sapiens
aacacaacgaaaggaaaagagaaagccagcacaccccaagagcccaccagagcccaagaccagccgggcgagc

SEQ ID NO: 254299 - RNA, 54 nt, Homo sapiens
cacaccaggcggcaggggcaaccagacgggccaaggcgagaacgcggacaagca

SEQ ID NO: 254300 - RNA, 85 nt, Homo sapiens
cggcccagcgagcggcccgagcaggccacaaggggggggggagacggggaccgcaacaagggaaaacaggcaacgggaagccgcg

SEQ ID NO: 254301 - RNA, 70 nt, Homo sapiens
agcgcagcgcaccaagagggaaccacgccgggagggacggaccacaaaacccaacgcggacccggcagcc

SEQ ID NO: 254302 - RNA, 67 nt, Homo sapiens
caagcggaaagcacgcgcacagaggaaacggagcggagaaaacagcaaccacaaaaacgacaagaag

SEQ ID NO: 254303 - RNA, 67 nt, Homo sapiens
gacccggaccagggagacgcagcaacaaaagaaggaagcacagaagcagcggcccccaggggacaca

SEQ ID NO: 254304 - RNA, 55 nt, Homo sapiens
ggcagccaccccgcccccgccccccccgccgcaccagccaaagacccccccccaa

SEQ ID NO: 254305 - RNA, 36 nt, Homo sapiens
ccggaacagacgcaggaagaaaagcaccgagcagaa

SEQ ID NO: 254306 - RNA, 72 nt, Homo sapiens
aacaccaagaaaaagccaaagcaagagcaggcgacacgcaggagagcggccccaacgcaaaacgggccaaag

SEQ ID NO: 254307 - RNA, 68 nt, Homo sapiens
acagaagcccagaggaccccagcaaacgggaccccagggacagcaaaaagcacagaaccaggaagaac

SEQ ID NO: 254308 - RNA, 70 nt, Homo sapiens
ccggccgccgaagaggccgccgccaagaagcaaagcagaaaccccggcaggcccgaaagagaaagcgaac

SEQ ID NO: 254309 - RNA, 69 nt, Homo sapiens
gagacaagggaaacggccagaaaacagaaggcagcgcaggcaccccccgacagcggagacagacagggg

SEQ ID NO: 254310 - RNA, 83 nt, Homo sapiens
aacgaggccggcgcccaaccggacccgcagcccgacgcgggcccgcaagcggaggaaaccccccaggcaagaggcgcaggacc

SEQ ID NO: 254311 - RNA, 80 nt, Homo sapiens
gccaagacccgagaaagcacagaagccggagccagccgccagaccgaacaacaccccaggagggcccacggccccccgag

SEQ ID NO: 254312 - RNA, 79 nt, Homo sapiens
ccgcaacagagggggaacgcgacgcggcaaagcagaggagccgcagaaccacagacggcggaaaacccgaagcagaagc

SEQ ID NO: 254313 - RNA, 73 nt, Homo sapiens
agaagagaagaaaacagaacaagcaaaaaagagcaaaaaacagacaggagcaaccccggagcaggaaaacgac

SEQ ID NO: 254314 - RNA, 72 nt, Homo sapiens
cgacacgggagcagggccaggcccgcagccaccccaggacagagcccaaaagcaaagcagggcagcaaagaa

SEQ ID NO: 254315 - RNA, 75 nt, Homo sapiens
ccccacccccccagcggccgcagggccgacaagcggaccaagccagacccaagaggaccagacccgaaccagccc

SEQ ID NO: 254316 - RNA, 41 nt, Homo sapiens
caagaagcgcccacgcagcagccgccgagagcggcccagga

SEQ ID NO: 254317 - RNA, 83 nt, Homo sapiens
gccccagaacgcagacagaggagcggacccccgcggcgcgcagcccagcaggaacaaccaaagaggaggaaaggacgagcacg

SEQ ID NO: 254318 - RNA, 65 nt, Homo sapiens
ccccgccgaggcacggggcggacgacccagccggggggcacagccggccccaccaaagccaccaa

SEQ ID NO: 254319 - RNA, 85 nt, Homo sapiens
gaccgagagcggaccgagagcgcgaaacgcacgagaaggaagcagggcagcccgagacaagaaaagagaagacgacaggaaaaaa

SEQ ID NO: 254320 - RNA, 67 nt, Homo sapiens
cggaccaccgggcgcggcgccccagccggccaggcagagcagcccaccagggaggggagggggggag

SEQ ID NO: 254321 - RNA, 52 nt, Homo sapiens
caccacaaacggccagagcccaaacgggcccgacaagagaggcggagccacc

SEQ ID NO: 254322 - RNA, 57 nt, Homo sapiens
caagaaacaccaacacaaaaaaaaccaacagccccccaggagaccaggcccaggaag

SEQ ID NO: 254323 - RNA, 80 nt, Homo sapiens
cacaaggagccaaaggacggcccgccaggggcggaggagaaaaccggaagcacaagggagagacaggaggggaaacgcca

SEQ ID NO: 254324 - RNA, 81 nt, Homo sapiens
ggcagcgccgagcggagggggcgaagagacgccagaagaacgaggaggagaagggcaaccacacaggaaccaacaaccagg

SEQ ID NO: 254325 - RNA, 73 nt, Homo sapiens
cggaagcgggggcaccagcaccccgcaccacagccagggaagaacagacacagcaccgacacgcgcaaaagca

SEQ ID NO: 254326 - RNA, 58 nt, Homo sapiens
gcgcagaccagaccgccgaccggcgcccgccggacggccagcagaagcaggcgagccc

SEQ ID NO: 254327 - RNA, 76 nt, Homo sapiens
acaccggcacccgggagaaagcccgaaagcagcaggccaggaccccgagggagcaacacaagaggcaaacaggaca

SEQ ID NO: 254328 - RNA, 53 nt, Homo sapiens
ccccccagaaccaccacacagaccaacagcccggaaggaagccgccaacaacc

SEQ ID NO: 254329 - RNA, 83 nt, Homo sapiens
aggaggcggagcggacaaaggagcgacaggacccaaacccgggccgcccggagcgccagcagcccgcccgggagcggcaaaaa

SEQ ID NO: 254330 - RNA, 78 nt, Homo sapiens
ggaggccgggccaggccaccggacagaaagcaagaccgaggaagaagaggaccaccaggaggaacagacggcgcagca

SEQ ID NO: 254331 - RNA, 73 nt, Homo sapiens
aaggcagcgaggggagagcgggaaacacaaagaagacaccagaagggccagcaccacgacaacacggcgacag

SEQ ID NO: 254332 - RNA, 38 nt, Homo sapiens
agaagcagagccaccgggcccaaggagaagacaccgga

SEQ ID NO: 254333 - RNA, 75 nt, Homo sapiens
cgggaggcgaacggcgccacgcagggccagggaggagacagcagcccccagggacccaaggacgaccacaggaca

SEQ ID NO: 254334 - RNA, 69 nt, Homo sapiens
gagcccccccaccacgaaaaccggagaggagaaacaacgaacgagcaaggaagggccaaggcagacccc

SEQ ID NO: 254335 - RNA, 73 nt, Homo sapiens
ggcgccgggaggaggccggggccgcgcgagggcgcccagcggagcagcgagaagagccagagaagaaaggaga

SEQ ID NO: 254336 - RNA, 74 nt, Homo sapiens
caagaacagcgacaccgcccccgccaggggaggcaagcaggggggcaaaggaaagaaggcagaaagggaggcca

SEQ ID NO: 254337 - RNA, 86 nt, Homo sapiens
aaacgaaaagcaggaaccagagggcaaacacgcgccaagacaacggaacgccgaaaaagaaacgggccggagcgagggagagcagg

SEQ ID NO: 254338 - RNA, 79 nt, Homo sapiens
gagacacaaaacccagacaccgacgggccgcgaggggaagaggaagcaaagccaagggaagcgcagagaagagaaaaac

SEQ ID NO: 254339 - RNA, 75 nt, Homo sapiens
cgcgcccgcgccggcgcacggcggccgcggcgcggcgccacgaccgaacaacaccccaggagggcccacggcccc

SEQ ID NO: 254340 - RNA, 85 nt, Homo sapiens
ccgccagggcgcagggccgggccgccgcgcaccgcagcgccggggcacgacacaaaaacagcccacaccgggggcacgggccaca

SEQ ID NO: 254341 - RNA, 82 nt, Homo sapiens
agagcggcagggcaccgcgcgaagcggccaaagccgcccagacggccaccggcgggaggaacaaaagacacaaggggggccc

SEQ ID NO: 254342 - RNA, 64 nt, Homo sapiens
ggagcagaggaagccgaggaccaccacagaaggaagaagaaaggcagacccggcaccacaggga

SEQ ID NO: 254343 - RNA, 70 nt, Homo sapiens
gaccaaaaaagacggagccaggaagaacggcaacagaacaagcagggcaccccaggcagccgcgaacccc

SEQ ID NO: 254344 - RNA, 84 nt, Homo sapiens
cgagcacagagcccgccgccgaccgccgcccgccacacccgccgccagcaaccagccaagggaccgcagggagacggcaccacc

SEQ ID NO: 254345 - RNA, 84 nt, Homo sapiens
ggcagcgcccggaccggccgagaggaagacgagccgggaggaacggcccggaaacaggaggacaggaagaacggagcaaggccg

SEQ ID NO: 254346 - RNA, 81 nt, Homo sapiens
cgaccacacccccacaccgccaccaggacaagaagcaccaaacccaccagcgcgaacaccaggaccgcggacggagcagcc

SEQ ID NO: 254347 - RNA, 62 nt, Homo sapiens
gcccgccaagcaagcgagccgcagcccccaagacaagacgcggacggagcccacacccgcaa

SEQ ID NO: 254348 - RNA, 50 nt, Homo sapiens
ccggcccgccgcccggagcacggcaccccgaaaggccggggaggagggca

SEQ ID NO: 254349 - RNA, 37 nt, Homo sapiens
gaagagggcggagacaaggggagaaagggagaggagg

SEQ ID NO: 254350 - RNA, 76 nt, Homo sapiens
aggcccagcgccggacggcacagagaccccccggccccggccccgccgcaccccgggagcgacggaaaaagaaacc

SEQ ID NO: 254351 - RNA, 67 nt, Homo sapiens
ccagaggacccaacccaggccagggaacagccagaaaagacgaggaaacaacccagacagaagaggg

SEQ ID NO: 254352 - RNA, 65 nt, Homo sapiens
ccacccagcgcccagcacacaaaacagcacgccacgcccacaaagcacaaccgaacagcagggaa

SEQ ID NO: 254353 - RNA, 66 nt, Homo sapiens
ggaaaaggacgcgcccaaccccaacggaacacgggcgagacaacaggaaagggccacgggagccgc

SEQ ID NO: 254354 - RNA, 72 nt, Homo sapiens
gcccccggcgcgagacccgccggaggaacaaccgcccagagaagaccacgcagggccccgagacaagaagcg

SEQ ID NO: 254355 - RNA, 76 nt, Homo sapiens
gggaccgaggccgcgagagaagagaagggcggccccgccgacccacgagcccggcgacagcccagggagccccaga

SEQ ID NO: 254356 - RNA, 71 nt, Homo sapiens
cacgcgaccacaaggaacgaggggccccaagagcacagaccagcagccgccaaagaccgacagaacaagcg

SEQ ID NO: 254357 - RNA, 73 nt, Homo sapiens
gccagcacggggacagccgcgccgaggaggccggaaaggcaccgggaaaacgcagaggaacgagggggagcca

SEQ ID NO: 254358 - RNA, 79 nt, Homo sapiens
gaccgagagcgcgaaacgcacgagaagccgggacaccacagcaagaggaacgggcacgccagaaaagaccaggagaagc

SEQ ID NO: 254359 - RNA, 56 nt, Homo sapiens
ggaggaaacagcggcaagccacagacggagagagacacaccgacacacgaggcggc

SEQ ID NO: 254360 - RNA, 80 nt, Homo sapiens
cagcagcagcagcaggcgaggaggaagaggcgggacggcgccggccggggggacgggcacggggagaccggaaaccgaga

SEQ ID NO: 254361 - RNA, 77 nt, Homo sapiens
caccggaaaccgcaacaaaaacagagggaacaggcacgccccacccgccagccgagcccccgacgcagcacaaagcc

SEQ ID NO: 254362 - RNA, 106 nt, Homo sapiens
ccgggccggcaggcgacccgaacgaaggcggcccggcgggccaccccacccccgggcgggcacccggaagcaaggcggccagcaaagaggagagaacacagccaga

SEQ ID NO: 254363 - RNA, 58 nt, Homo sapiens
gggacagaacaaggcgaaggaaacagaagaacacacgaaggccagcggcgggggagaa

SEQ ID NO: 254364 - RNA, 78 nt, Homo sapiens
gcgcgagccaggaacgaggaaccccgaaaacaaccccggcaggacgaaggagacgcaggagggagagcagccagagga

SEQ ID NO: 254365 - RNA, 74 nt, Homo sapiens
cccacggcgcagacggcccagacgccaacaagaaagacgggcccagccaaaaacggaagacaaaaaaacgcacc

SEQ ID NO: 254366 - RNA, 80 nt, Homo sapiens
ggccacaggcccaccacaaagagacagagaccagggcccgggcccgcgggaagaagacggcacgggacccccagcacagg

SEQ ID NO: 254367 - RNA, 69 nt, Homo sapiens
gaagaagcaaagccaaaagaaggcagcggagggaacgaaggaacaaaggccagagggcccaaagcggag

SEQ ID NO: 254368 - RNA, 74 nt, Homo sapiens
acacacacaagagggagagggcccaaacgacaccccaaggcaccaagggaacggaagccccagcccgcgcgagc

SEQ ID NO: 254369 - RNA, 67 nt, Homo sapiens
ggaccagagacaagacaaagaggggagcagacggcaggccagacccccagaagggaacacccgcaca

SEQ ID NO: 254370 - RNA, 74 nt, Homo sapiens
caggcccgggcgaagagcccccccccaaggagaaaggagcaaccagggaaaagaagaacgggggacaacggcaa

SEQ ID NO: 254371 - RNA, 84 nt, Homo sapiens
ggcagcaggcacacccaacagaagaagcgcaggcacgacggccagccaaacggaggaaaaggacgccgaaaagggagagcacaa

SEQ ID NO: 254372 - RNA, 73 nt, Homo sapiens
ggagaaacccagaaaaaacccgagcagaaaggcacagaagaggacacaaagaagaaggaggaacaggaagccc

SEQ ID NO: 254373 - RNA, 81 nt, Homo sapiens
cggcgcggagcgccgcaggcggcggccgagggcgcgcggaccccccgcgagagccgggcgccggccgagcccgggaaaacg

SEQ ID NO: 254374 - RNA, 82 nt, Homo sapiens
ggggacccaaaccggagccacagcgacacagggagaaacggaaacccacacaagagggaaacgggcagaggccgcgcgagga

SEQ ID NO: 254375 - RNA, 82 nt, Homo sapiens
ggaaagccgcacaaggagaggaccggcagcaacgagccaagaaggagggccccaccccagggcccaggcaggggaagccccc

SEQ ID NO: 254376 - RNA, 79 nt, Homo sapiens
cccccaaaaacgggaaaggcggagccaccagcccagccaaaaacaaacagaagaacagcaaggagccggaccagaccgc

SEQ ID NO: 254377 - RNA, 54 nt, Homo sapiens
gaagggacaccgaagagcagaccgaaaagggcggaaaaggaccaaggcccgcaa

SEQ ID NO: 254378 - RNA, 71 nt, Homo sapiens
aaaacaaaggaggggacggagcgggcccgagaaagagcagaagagcgccagcggcaggcgagcgacaacgc

SEQ ID NO: 254379 - RNA, 39 nt, Homo sapiens
gagcccgccgccacacccgaggaaggaggggcccggggg

SEQ ID NO: 254380 - RNA, 84 nt, Homo sapiens
cagccgagcggccggggcccgggcggcgggcggagacggggcgcccccccgccaaggcccggcgagccacgggccccgccagca

SEQ ID NO: 254381 - RNA, 75 nt, Homo sapiens
cggcagcacccccaggacccgcaggacccccgacgacaggaaggagcagccacagaggagaagcgaccccgggcg

SEQ ID NO: 254382 - RNA, 72 nt, Homo sapiens
aaaaaccgccgaaaaagagaagacgcacccgaccgggccgaccacgccgacagaacagaaaggcaaaaagag

SEQ ID NO: 254383 - RNA, 67 nt, Homo sapiens
ccagagggaggccaaagaaagagaaggcgacggcgccgaggcgcggggggaagaagcggacccaaga

SEQ ID NO: 254384 - RNA, 60 nt, Homo sapiens
caaccaagaaaccgggagggaacgcaacaggagcaacgaaagagcagcagaggaaccgcg

SEQ ID NO: 254385 - RNA, 76 nt, Homo sapiens
ggcccggcggaaaggacagcagcaccagcccgaagaagccgggcagaccaggcagcagcggaaaggagcagggaag

SEQ ID NO: 254386 - RNA, 86 nt, Homo sapiens
gccgagcaacaaccgccgagcggagcaggaaccaaagcagccgcgaggcgacacgaaggaggaaaaaacaagcagaaccaaaagaa

SEQ ID NO: 254387 - RNA, 71 nt, Homo sapiens
gaagagacaggggaggcacgcgaggagacacagcaggaacaagggccagaagcagcgaacagagcagggaa

SEQ ID NO: 254388 - RNA, 82 nt, Homo sapiens
accaccacagcagacagcaaggcgccaggaccgaggcgagacgggcgaccaggacgggagaggcgcaggaggcacacagccc

SEQ ID NO: 254389 - RNA, 64 nt, Homo sapiens
cgagaaaacccgacaccccaagagcggagcagagggcagaggccgggagcgcaagaggacagac

SEQ ID NO: 254390 - RNA, 66 nt, Homo sapiens
ccacaccacacagagagcgaaaaaggggagcggacgggcccaggagcaggagccacgcagacgggc

SEQ ID NO: 254391 - RNA, 82 nt, Homo sapiens
caaggcggcggaggaggaaggccgccgcgcccagcagacccgacccccacacaccgcaggcacaagccagcggacgaggggg

SEQ ID NO: 254392 - RNA, 59 nt, Homo sapiens
cgccacggaccgcgggacaagaaaacagcgaagcgcacacaacagaagagaagcaaaaa

SEQ ID NO: 254393 - RNA, 84 nt, Homo sapiens
cgggacaacaaaagagccacccaaggaagagagaccaaacaccaagcgcccaggggcggggcacaagccacgggaggaggggag

SEQ ID NO: 254394 - RNA, 97 nt, Homo sapiens
aagagaacgccacaaagaagggaaaaccagcgagggccgaaagaccagagaagccggaacaaagaccgggacaaggcgcccgggaacagggaccaca

SEQ ID NO: 254395 - RNA, 71 nt, Homo sapiens
ggaaaggcggaaaaaaggcaggaaaacgcaaaaccagaagcgcgccgacacggcccgggcagccaggaggc

SEQ ID NO: 254396 - RNA, 70 nt, Homo sapiens
agaagaaacccacgaaccaaaagggacggacaaaggaacaggaccaggcgaagccgacgagcccgaacag

SEQ ID NO: 254397 - RNA, 64 nt, Homo sapiens
cgagaggagcggagcccgcagaaccccacagcaagaggacgggggcagcacgccgaaggagaga

SEQ ID NO: 254398 - RNA, 83 nt, Homo sapiens
caagcagcagaagagccaaggaaaaacagcaagaacccaaaaggggcaccgcaaaccgaagggaacacagcggccccacacgg

SEQ ID NO: 254399 - RNA, 77 nt, Homo sapiens
gaggggcccgccaccagagcacacagagaagacggcccagcagagcacccaaccagcgggaacacagcgccgccccc

SEQ ID NO: 254400 - RNA, 70 nt, Homo sapiens
aagggacacgcagcacaaaaagggcgaaagggggaaaagaaaacgcaaagcaaccgcacaacagggaaaa

SEQ ID NO: 254401 - RNA, 75 nt, Homo sapiens
gcgggccgagccacacaggagaccagcaccagacagcgaaaaagaggacccaaaaaagagagaaaaggccaaaga

SEQ ID NO: 254402 - RNA, 83 nt, Homo sapiens
aaaaaaccccaaagaacccgacgccaaaagaaacccccaaaaccggaagaaagagaaggaacagaggacacgcacaccacaga

SEQ ID NO: 254403 - RNA, 36 nt, Homo sapiens
ccccgggagagggagccaggaaaaaggaagcggaca

SEQ ID NO: 254404 - RNA, 59 nt, Homo sapiens
agcaggaagcagggcaaacaaggccagcgaagacggaggaccacaccggaagccagcaa

SEQ ID NO: 254405 - RNA, 52 nt, Homo sapiens
ccacagaagaccaaacgcagaccagcccaggaagggccggaaccaccaccag

SEQ ID NO: 254406 - RNA, 50 nt, Homo sapiens
ggccagaccggagcagcggggacagggacggacacagggagggccaagaa

SEQ ID NO: 254407 - RNA, 74 nt, Homo sapiens
cgggacagacagccgcacgaaccggaccaggaggacggcaagcggcaccacgacaaccccacaccaacgagagg

SEQ ID NO: 254408 - RNA, 77 nt, Homo sapiens
ggagcggagggggggcgccagaaccgacagaagaaaaggcccaccgggcagacaaccccagccggcagggcagacgc

SEQ ID NO: 254409 - RNA, 70 nt, Homo sapiens
gacaaagcgaaagcacaccaagacgccccccaagaaaccaaccacaggacaagaccagccccgacacccc

SEQ ID NO: 254410 - RNA, 51 nt, Homo sapiens
caagggaaacaccgaaagcgaggaaccgcagaggaaaagggacaagagccg

SEQ ID NO: 254411 - RNA, 79 nt, Homo sapiens
caccacacggaagcaagaaagacaccagaccagagcacgggcagcagcgccaagacaaggcagcgggccaagcaccagg

SEQ ID NO: 254412 - RNA, 83 nt, Homo sapiens
acccaccgagaaggccagcaggagcgcagaggcggagacagaggggccaacccgcgagcgcggaaggacaccgggaccgggga

SEQ ID NO: 254413 - RNA, 79 nt, Homo sapiens
aaacaaggagaagaagcagaagaaacagaacggaacccaccccacagccccaagcagacaccacggcccccaagccaaa

SEQ ID NO: 254414 - RNA, 79 nt, Homo sapiens
gaacagaagacacaaaaacaggggagaaagcaagcaccagagacacgacgcaaaggccaccaggcagccgcgagacaca

SEQ ID NO: 254415 - RNA, 87 nt, Homo sapiens
cggggccagggccggcgagcacacgccgaggcccaccagacgaccacgacgaggccggggcacagagacaaaaggacccaggaaagg

SEQ ID NO: 254416 - RNA, 86 nt, Homo sapiens
gcgggagagccgggaccggccgggaagcggccaccgacacgcagcagcggccagaacgaaagagacgcacaagaaccaaacagaag

SEQ ID NO: 254417 - RNA, 68 nt, Homo sapiens
cacagagacgcaaacaaagacccggacccgaaagaaggggaccaaaacaaaacgagagcaagaggaaa

SEQ ID NO: 254418 - RNA, 66 nt, Homo sapiens
agacgaggaccaaccccagcaaaggggccacagagacgacccgggccagccgccggaacccgaacg

SEQ ID NO: 254419 - RNA, 81 nt, Homo sapiens
acggcaaaagcacaaggaccgcggacagagacaacaccgagagagaaacccaacagaggaagccgcaagaaacgggacgac

SEQ ID NO: 254420 - RNA, 78 nt, Homo sapiens
acggccagagcccggagcaggaaaaacacagagacagacggcggcaggcccccgaggagggaacaagccagaccagga

SEQ ID NO: 254421 - RNA, 87 nt, Homo sapiens
ggcgccgccggcccgcgggaccgacagccgggcagagcacaacccccggcccagagaccgccccagcggacgcccaagagcgggacg

SEQ ID NO: 254422 - RNA, 75 nt, Homo sapiens
cggcggccaagcccaacaacccccgggggcacggaccgggggacgcgccggaaagaaagccaaaaacccgaagcc

SEQ ID NO: 254423 - RNA, 72 nt, Homo sapiens
aggaccagagcgacgagaagagagagaagggagagagaccaaagacgagagcacccggaaagccggacaaga

SEQ ID NO: 254424 - RNA, 38 nt, Homo sapiens
caacaggaggccaccaacaggcaacagacaggcgccag

SEQ ID NO: 254425 - RNA, 54 nt, Homo sapiens
gagcaacgagggcagcgcaagcccgcccccgagcaaccacgcacagcaagaaaa

SEQ ID NO: 254426 - RNA, 58 nt, Homo sapiens
ccccgcccgcgggcgccgccagccggcccccgcccccaggaaggaagggaacacggac

SEQ ID NO: 254427 - RNA, 71 nt, Homo sapiens
aaagggaaacccgggcaaagaccaccgcgaggagacggagcgaaacgacgccggcgcggaagaggccggcg

SEQ ID NO: 254428 - RNA, 80 nt, Homo sapiens
gcagacacacaacccgacccgacgaagcgaaagagcaacccagccaagaagcaagagaagccaagcgggcaacgaccgac

SEQ ID NO: 254429 - RNA, 75 nt, Homo sapiens
aaacacaccgacaacagcgccaaaaaaaaaaggaaaacagaagggcgcagggcgaaaccagcgaagacacagcca

SEQ ID NO: 254430 - RNA, 71 nt, Homo sapiens
ccgacgaaggggagccacaggagagcgcccagcaaggaacgcacaaaccgcagccacgcgaggcgaggaaa

SEQ ID NO: 254431 - RNA, 73 nt, Homo sapiens
agcgaagcacaaagaggaccacagcagaagagaggaagaagacagcaacggaaccacaccgcgaaaaccacca

SEQ ID NO: 254432 - RNA, 55 nt, Homo sapiens
cgacccggcacacaaagccagcagcagggcgacagacacagcaccggccccggca

SEQ ID NO: 254433 - RNA, 72 nt, Homo sapiens
gaacacagcggacagaggggaaagagcaggcaacagcggccggcccgcgccccagcagacacgggacgccgg

SEQ ID NO: 254434 - RNA, 78 nt, Homo sapiens
aggagaccagaccagaagccccgaaaagccaaaagcgagacaagacgaaaggacgccacaaggagcaaagaagaaaag

SEQ ID NO: 254435 - RNA, 35 nt, Homo sapiens
gcagcgggagacggggaccggccgaaaagacgagg

SEQ ID NO: 254436 - RNA, 80 nt, Homo sapiens
cccggggccggcgaggccaccgaggcgaggagaggagagccagggggagcccggcccagccccccaccccccgccccccc

SEQ ID NO: 254437 - RNA, 70 nt, Homo sapiens
gacagacaggccggcgggagcccccgccacccaacgaagcggcaaagacgagacagccccgcccaacgcg

SEQ ID NO: 254438 - RNA, 80 nt, Homo sapiens
aagcccaggagggacccaggcgagggaaaagagcccacgaagggcgacggacagagccaaagaacgccaaccgaaagaaa

SEQ ID NO: 254439 - RNA, 64 nt, Homo sapiens
caccccaggacccagcacgcaagagagaggacgaggaggagaaggcccaggaccgagagcgcgg

SEQ ID NO: 254440 - RNA, 82 nt, Homo sapiens
agaggggaagccaagcaaacgcagaaggacgcccacgagcaaccaagagccacaaaagacaagacacgagaagggccaagaa

SEQ ID NO: 254441 - RNA, 105 nt, Homo sapiens
gcagaggccccgagccccgggaccgcggagcggagccggccgacgcgggcgcgagggcagaaccggacagaggcggagcacggcgaccgagagggacacagccca

SEQ ID NO: 254442 - RNA, 79 nt, Homo sapiens
cccagcgacgcaccagcaagacggcaggcgagagccgacccaggccgccggccccacaggcccacagacacacccaaag

SEQ ID NO: 254443 - RNA, 71 nt, Homo sapiens
ccgcgcaccgacccgacgcgccggcccacgcgcggccaagagagcacaggagcacgggagcaggggcagac

SEQ ID NO: 254444 - RNA, 59 nt, Homo sapiens
gaagcaaagcagccaacaccagaagaagggacaaaagggcggagaacggaaaagcacca

SEQ ID NO: 254445 - RNA, 73 nt, Homo sapiens
cggagaaaaggccaagaaggcagaggaggagagaaagaaagccagcgcaacgagagaaccagcagaaaagaag

SEQ ID NO: 254446 - RNA, 78 nt, Homo sapiens
aggcggccagcaaagacccacggggcagaacacaccgagccaaagggacgagaagaccacaggacccaaagacaggac

SEQ ID NO: 254447 - RNA, 57 nt, Homo sapiens
gaggcagagccaaacacccagcacccagccaaacccaggcccgagaagaagaggaaa

SEQ ID NO: 254448 - RNA, 72 nt, Homo sapiens
acacaaaggggaacccgcaagggcccaggaaaagggaccgcgcaagaaacgccggagggaaaaaagcgaaaa

SEQ ID NO: 254449 - RNA, 79 nt, Homo sapiens
ggaaaagggggaggcaaagagcaaagaagaggccgcaaagcgacaagagacagcagggaccgccgcgggaaacgaccca

SEQ ID NO: 254450 - RNA, 55 nt, Homo sapiens
ccgcccgggccagcggccgcgcacccccggccggaggagcacacaccacccccgc

SEQ ID NO: 254451 - RNA, 69 nt, Homo sapiens
aaacgccgagaagcccaaaggagaccgccagaagacaacacggagaggcaccccgacccacacagggag

SEQ ID NO: 254452 - RNA, 57 nt, Homo sapiens
caaccccgccagcgcggcccgggcaggggggaacccaagccagaccgcccgagaaag

SEQ ID NO: 254453 - RNA, 66 nt, Homo sapiens
ccaccaccaaaaggggaacaacacagcccccccaacagagcgcaagacagggaagaaaagggaacc

SEQ ID NO: 254454 - RNA, 80 nt, Homo sapiens
ggccgcggccggggcaggagcgcagcacaccgacagagaacccaggccaacacacagacagaggcagccaccccagacga

SEQ ID NO: 254455 - RNA, 88 nt, Homo sapiens
ccgcaggagagacacgcgggccgaccccagagcggcgcggacagggacacgggagccccgcaggacccccgcacacgcccacacagca

SEQ ID NO: 254456 - RNA, 73 nt, Homo sapiens
cgcgccggcccagcaccccgagaaccgcaggagccagaggaagaagacggcacgggacccccagcacaggcag

SEQ ID NO: 254457 - RNA, 79 nt, Homo sapiens
caaacaccccccccaccaccccaccagaaaggaagggccgggccggggcacgggcccacggccccccaccgggccaccc

SEQ ID NO: 254458 - RNA, 71 nt, Homo sapiens
gcccgaagaaaccgaagcagaagaccagggacacagcaggcggaccccccccaccccacccaaacgaagag

SEQ ID NO: 254459 - RNA, 77 nt, Homo sapiens
agggcgcaacaagagcgacaaacgcagcccggaccgacaggaaagaaggagcccacaaagaaaagaacaccgccagc

SEQ ID NO: 254460 - RNA, 62 nt, Homo sapiens
ggggagcaggaacaggggggaccaaggggaggagaacgaggacacagaacgaggggaagagg

SEQ ID NO: 254461 - RNA, 75 nt, Homo sapiens
gggccgaggccgggacaagcagcaaggcgcggggggccacgcgaggccgagacaaagccgaggcaccaaacgacc

SEQ ID NO: 254462 - RNA, 76 nt, Homo sapiens
cagaccgccaaaccagagaaagaaacacccgaacagcgagacggccaggccagagcgggagaagcccagaccgcgg

SEQ ID NO: 254463 - RNA, 79 nt, Homo sapiens
gagcgacagcccgggacaccaagaaagaacagccccccaccaggaaccacgccccgagcgcccggagacccaggagacc

SEQ ID NO: 254464 - RNA, 68 nt, Homo sapiens
ccgagccaaaacaacaggagaaaagcacgacacacggcaacgggggcccccgaggaagggcgcgggag

SEQ ID NO: 254465 - RNA, 74 nt, Homo sapiens
agggagacgacagaccggggcaagccccgggcgggacaggacccaccgcgaggcgggggaagcccgcaaacccc

SEQ ID NO: 254466 - RNA, 78 nt, Homo sapiens
ggccgagagccgcggcccggcggaaaggacagcaggccgggaacggcagacgcagcagagagaccaccagcgagcgca

SEQ ID NO: 254467 - RNA, 66 nt, Homo sapiens
cccaccacggccggagacccgccgcgagccagaacggaagaccaaccagaagacacacaaagcagg

SEQ ID NO: 254468 - RNA, 71 nt, Homo sapiens
accgagcccacgaacccgaagcccccaaagagagaaccggagagcacccaacaacaaaacgagcgaaccgc

SEQ ID NO: 254469 - RNA, 62 nt, Homo sapiens
ccgcgcgcggcccggggcccgaaccgcggccagccccgagagcgcagacaggggggccaagc

SEQ ID NO: 254470 - RNA, 82 nt, Homo sapiens
acaggagaggcgccagagagagcgcggaacagcacagcccagagagccgacgagacgaggcacaccaccgaacccaccccag

SEQ ID NO: 254471 - RNA, 102 nt, Homo sapiens
gggacgagccgagcaggagagacagacacagccagagaaggggccagcggaaaaacgcagcgagcaagaacaagccaggaggcggagaaaacggcacaggca

SEQ ID NO: 254472 - RNA, 72 nt, Homo sapiens
gccgaaaccgggcgcaggcggcaaaccaacacagcgggaaagaaagcagccacgagaagacgaaaaaaaaga

SEQ ID NO: 254473 - RNA, 79 nt, Homo sapiens
agcagcgaggccaggcgcggcggcaagcggggcgggagccgcagagcacacgacgaaggaggacagggaacgaagaccc

SEQ ID NO: 254474 - RNA, 71 nt, Homo sapiens
agggggaagggcccaaagccagaaggaggcaggaaggccggcccaccaacgacagggcccggacaggacag

SEQ ID NO: 254475 - RNA, 57 nt, Homo sapiens
cccacagcgcccacaaggacaagcacgacaaagaaggaaccaacccgccaccaagaa

SEQ ID NO: 254476 - RNA, 62 nt, Homo sapiens
gccggcacagcacgcccggcaccccgaccaggggcacacccgaccaggccaaccgaccgcaa

SEQ ID NO: 254477 - RNA, 74 nt, Homo sapiens
ggcgcagccaccccgcgggaacgcccagcgcgggaccgagcagagaaccaacggagaacagcccaccgagaaac

SEQ ID NO: 254478 - RNA, 82 nt, Homo sapiens
ggaacagccagaaggacccgaaaccagcccacgccaggcaaggagaagagaccggcacagccgaggcaccaggccaacagac

SEQ ID NO: 254479 - RNA, 80 nt, Homo sapiens
cgggacggagcggccggggccggggcgccgccgggcggccgggcgcggcgagcccaggaccgcacaggcgcaggcgcaag

SEQ ID NO: 254480 - RNA, 64 nt, Homo sapiens
agcggaccagggccccagggacgcagggggcagggcagaggacagggcgaaccggcagaggccc

SEQ ID NO: 254481 - RNA, 60 nt, Homo sapiens
ggaaagccagcgcggagagacagcggaaagaaacacaaagcgccaaggcggggcacccaa

SEQ ID NO: 254482 - RNA, 60 nt, Homo sapiens
cgcgccaagcaggcaccagacggagcgaacgccacacgggcaccaggaagaagaggcgga

SEQ ID NO: 254483 - RNA, 78 nt, Homo sapiens
gccaagggagccccgaaccccgaaggcgcggcaggccggagagcggggcggcgccgggccagagaaacagggcgccag

SEQ ID NO: 254484 - RNA, 78 nt, Homo sapiens
caacacgggaaggaaaccaagaggcaaaaacaacaaaaccagaagcgacgccgggaaaagagccaggcagaaaagaaa

SEQ ID NO: 254485 - RNA, 80 nt, Homo sapiens
gaaaccaccgggaagcgccggggaacgcagacaagcagaccggaagaccgacggaagaccacaccccgagggagcccagg

SEQ ID NO: 254486 - RNA, 68 nt, Homo sapiens
agcagagaacacgggcacacaggaccaccaagaggcgcggggacagcccagcacaacccccgcgaacc

SEQ ID NO: 254487 - RNA, 76 nt, Homo sapiens
gccacagaacaaggagggggacaccagccaggagagaaccagaccgggcggagacaagccagccggacgacagcgc

SEQ ID NO: 254488 - RNA, 64 nt, Homo sapiens
cgcgccagcccaggaaaggcgccgaagagagggacgcagaaacgacagaaccaggaggccagga

SEQ ID NO: 254489 - RNA, 88 nt, Homo sapiens
acggcggcaaagccgagaaggagaacaccccgagcgaggccaacccaggaggaggaggcgccacaggagccgcagaagcaaaggcacc

SEQ ID NO: 254490 - RNA, 80 nt, Homo sapiens
cggccacagcggggaaggcagacacggcccgggcaaacagcagaacgcaagaggggaaccacccaccgagcgcaccccag

SEQ ID NO: 254491 - RNA, 58 nt, Homo sapiens
caggcaggcgcgagaaggacgcgcagccaccccagagcccaaaaggcagagcgaggag

SEQ ID NO: 254492 - RNA, 57 nt, Homo sapiens
accacggcagacagcacaggcaaaaagaagccaaacaacccaaagaaaaccagacgc

SEQ ID NO: 254493 - RNA, 102 nt, Homo sapiens
cccgcgcagccgagagccgggggagcggggccccacacccccccgggggggccgagacagaagcgggcggccacggacacaacaagggccagcaggacggcg

SEQ ID NO: 254494 - RNA, 77 nt, Homo sapiens
acgccccagggccagcccgggaccacggaccaaaggccgggcgcagaacccccagaccacagacccaaagacaggac

SEQ ID NO: 254495 - RNA, 79 nt, Homo sapiens
gccgaggcgcaggggcgcggaaagaccacacagggaaacgaccagggagagaccaacaggaaccacagcggccgcgggg

SEQ ID NO: 254496 - RNA, 68 nt, Homo sapiens
caagagcagcacaaaaccagggagaacacagagcagaaaaccaggacacgcaggggagaaccggagga

SEQ ID NO: 254497 - RNA, 62 nt, Homo sapiens
ccaggggacaaaggagccaggacaaggccagaagagaaggggaggcagagagcacagccccg

SEQ ID NO: 254498 - RNA, 71 nt, Homo sapiens
cccaccacggacagcaaacagacgagaggaccgccgaagagcaccagagcgcaccccccgagggaggcccc

SEQ ID NO: 254499 - RNA, 69 nt, Homo sapiens
cggaagaacaggcacagggcgcacacgggaggagcaggcagaggcgcgcgacgggaccacaggcgaccg

SEQ ID NO: 254500 - RNA, 86 nt, Homo sapiens
ccagcgcgcgccgccagccagagggccgagagccgcggggagaaggccacacccagacaggagacccaacaccccagccagacggc

SEQ ID NO: 254501 - RNA, 64 nt, Homo sapiens
aaggcaggaagccggggcggaacagggcgcacacccgcacgaggaacagcaccaaaaacgacgc

SEQ ID NO: 254502 - RNA, 90 nt, Homo sapiens
ggggagccgcacgccacagcgaaggcgcgagggacaagagcagaccgacaggcaagacggcagggacacaacaaccccagagcaaccaac

SEQ ID NO: 254503 - RNA, 58 nt, Homo sapiens
aggggagcaccaggaccgggccggaacgagacgcacggacaccaggagaaacgggcaa

SEQ ID NO: 254504 - RNA, 54 nt, Homo sapiens
caggaccggaccaggagccaacaggcagaccgaccaaacagggagcagcggaca

SEQ ID NO: 254505 - RNA, 67 nt, Homo sapiens
accaagacggagcaaaggagggcccacagacaaaccagaagacccacccacaccaccgaaaaaaaca

SEQ ID NO: 254506 - RNA, 63 nt, Homo sapiens
cagcggcgccagcaagaaagacagagcaccaggagaccacaccgcaggaaggacacccacgac

SEQ ID NO: 254507 - RNA, 79 nt, Homo sapiens
cagggcagacaagacccggagggcgagccggcaccagggcccaggaaaaagcccaggaccaacaaccgaaaagaggaga

SEQ ID NO: 254508 - RNA, 92 nt, Homo sapiens
ggaagaggcggacggaggagcaggcgagaagagaagaaaagcaccaaagcagcaacaaagcacacagcgcgccaaagcaagagcgccgacaa

SEQ ID NO: 254509 - RNA, 78 nt, Homo sapiens
ccgccgcgcacaccggcggcgggacgacgcggacagcgggcggagccgacgagcggcggccgacacagcccccgagga

SEQ ID NO: 254510 - RNA, 84 nt, Homo sapiens
ccgacacagcgagaaggcccaaagaacaaggagggggccagggacagaccgcaagccggcacacagcggccgccacgcccgccg

SEQ ID NO: 254511 - RNA, 73 nt, Homo sapiens
agccacggggaccgacccagggggacgcggaccccagaggggccccgcaggaagggccgggccggggcacggg

SEQ ID NO: 254512 - RNA, 80 nt, Homo sapiens
gccacccccagagcaggagaagcgagcccggacagaccaaccgcaggcgcaacccccaacaaccacaaagaaaaagaaag

SEQ ID NO: 254513 - RNA, 79 nt, Homo sapiens
gagcgcaagaggccgcacccggaggaaagcagacggacgccgcccgaacacacccgagcccaccgccgcagcacacccc

SEQ ID NO: 254514 - RNA, 73 nt, Homo sapiens
cagcaccagcgggccggaggagccagagcgcagaaagccaaggccgacaaaaccggccgggaagcaagaaacc

SEQ ID NO: 254515 - RNA, 88 nt, Homo sapiens
ccgcagacaaggaaaaacccaaaaagaggggggacagcagcagcagacgaaagagccgcagacgcacagcaaccaccggacccgaagg

SEQ ID NO: 254516 - RNA, 56 nt, Homo sapiens
gagcggaggacaggagaccgaacagagaggggagccagccccagcgccacagacaa

SEQ ID NO: 254517 - RNA, 72 nt, Homo sapiens
gggacaaccgcaccagcaggggaaccggaaagcgaagagcagagcaaaacgaagcgaaagcgccaagaaagc

SEQ ID NO: 254518 - RNA, 59 nt, Homo sapiens
ggcgggaccacaagacaacgcggagcggcgaagagcaaccaggacgagcgggaaggaac

SEQ ID NO: 254519 - RNA, 71 nt, Homo sapiens
ggaccaaccggcaagggacaacggccaaaaaagaccacagcgccaaagagaagagaaggagccaagacacg

SEQ ID NO: 254520 - RNA, 52 nt, Homo sapiens
cgccaagaagcgagacgaagaagaggccgcacagaagccacccccagacgag

SEQ ID NO: 254521 - RNA, 75 nt, Homo sapiens
aggacgggcccaagacaaaaggcccagagccccgcagggagaaaggaagggccaagaaaagaagaaggacggagg

SEQ ID NO: 254522 - RNA, 57 nt, Homo sapiens
acagacagaaacaccagacagcgacagaacacagaagagaacccgaacacagcagga

SEQ ID NO: 254523 - RNA, 71 nt, Homo sapiens
aaacacccccagaagagacccagcagggcgggcggagagaacgagagcacgaagagacacaggcccgacca

SEQ ID NO: 254524 - RNA, 79 nt, Homo sapiens
cccccggcgggcccgaggcggcgagagaggcaggcggagccgaccgggccaggggaaggcacagcaggagaagaacaga

SEQ ID NO: 254525 - RNA, 73 nt, Homo sapiens
aagacacccggaagcacacacggggcggaaagaaagagcacgaggcgagcggggagacccgagagaccaaggg

SEQ ID NO: 254526 - RNA, 79 nt, Homo sapiens
ggggaggggcccaggaaagcgaccccggggccaccgagccaaaaggacggaagaagacggcacgggacccccagcacag

SEQ ID NO: 254527 - RNA, 61 nt, Homo sapiens
cagcagggacaaggaccagaagaaacgcaccggaaaggccaccagcagcgaaaaggggcca

SEQ ID NO: 254528 - RNA, 62 nt, Homo sapiens
acggacggagaacacggagagacgaggacgcgcacaggaaaggacgcggaacaagcaggcag

SEQ ID NO: 254529 - RNA, 65 nt, Homo sapiens
cccagacaagccccagggaagccacagcaccccagcacccaggggcacagaacgaagaggagcag

SEQ ID NO: 254530 - RNA, 83 nt, Homo sapiens
cagcccgcgcccgccgccgcccgccccagcagccgccgagcaccggggccccaagccccgaaagcccccagagacacacgcac

SEQ ID NO: 254531 - RNA, 78 nt, Homo sapiens
gcgcgccggaaaccggagcgcgcagcagggggggcacgagaagccgccgagagacccgccccgcagcaagagcacacc

SEQ ID NO: 254532 - RNA, 53 nt, Homo sapiens
aaggggggacaaacagagagacggcgaagagcagacggaccagaacagagaag

SEQ ID NO: 254533 - RNA, 73 nt, Homo sapiens
gaccaccggaccgcacgccccgcgcaaggagggagagccaaggccgaagaagagaagacagcacgaaaagcaa

SEQ ID NO: 254534 - RNA, 70 nt, Homo sapiens
ggaaccagcggacgcggaggcccaaccgaagaaaacaagaggaagaaacaagcgagaggaagcacagcag

SEQ ID NO: 254535 - RNA, 105 nt, Homo sapiens
gcgcagaggacacgaggcggcgggcggagacaggaccgcggcgagcaagagacaaagcaggaggacacaagaagggaggaaaggcggacccaggaaccaccacgg

SEQ ID NO: 254536 - RNA, 92 nt, Homo sapiens
cacccccaaccacccccaaacaggcggccccgcccaggccccaaggagccacaccggaccagaccccaggaaagaacaccgcccagccaagg

SEQ ID NO: 254537 - RNA, 84 nt, Homo sapiens
agggaaaaagaagggagcggccgaaggagccaccaggccgggaagcccacggacgcaccacgacggggaagagaggcccggcca

SEQ ID NO: 254538 - RNA, 76 nt, Homo sapiens
gaacaacagcacgggagaaagcgcccacgcacgaaagcccaggccaaaaagaggacagcccagagcaagcacacgg

SEQ ID NO: 254539 - RNA, 59 nt, Homo sapiens
ggcaaaaccaaaggcggaaaaggggcaagggacggcaaccggcacgcaccagagcagcc

SEQ ID NO: 254540 - RNA, 77 nt, Homo sapiens
ccagcaggacaaaaggcaagggcggaaagcaagggagaacagagcaaccaccaaagagagaggggaaagccacgcgg

SEQ ID NO: 254541 - RNA, 82 nt, Homo sapiens
aaaaacggagggacccaaccaaggggacggaaagagagccgcagcgcagaacaagggaaaaaagggcaaaaagggcaaaaaa

SEQ ID NO: 254542 - RNA, 71 nt, Homo sapiens
ggacaccgcccaccaaccagagagccaagcaaccaccgaaacgggcgaaaaagaagaacagcaaaacacga

SEQ ID NO: 254543 - RNA, 83 nt, Homo sapiens
agaccagcgcccgaaggccgacacgcggcccgaggcaacggccacagacgcccaggcaggcgacgggagcggagaacacgcca

SEQ ID NO: 254544 - RNA, 67 nt, Homo sapiens
gccacaaagccccccggagacgcaaccaaggagcgggccgagagggcgaaagaaagcgcccaccaag

SEQ ID NO: 254545 - RNA, 81 nt, Homo sapiens
gcaccccaacacaacagcaggggcacccgagcagagaagcggccgggcccgggaccaggccgggagaccaagaggaagaag

SEQ ID NO: 254546 - RNA, 82 nt, Homo sapiens
cggaccaggccgggacacaagaaacaaacgaagcacccccagaacggcgcacgaccccagagccgcccaacagggaaggaga

SEQ ID NO: 254547 - RNA, 54 nt, Homo sapiens
aaacccccaacccaggaaaaagcagcaaagggagaaaagaaggccaaacagaag

SEQ ID NO: 254548 - RNA, 79 nt, Homo sapiens
agaggcaccaagaaagaccgggagggagagaaaggccagcacgggggaacaaagggaccggaaaggagagagaagacgc

SEQ ID NO: 254549 - RNA, 62 nt, Homo sapiens
ggagaagcacaggcaacaacgaagcgcgcggcaggcgcgcgccgccccaggccgcaagaccc

SEQ ID NO: 254550 - RNA, 63 nt, Homo sapiens
ggaggcggcaagagggaagagagccaacggcacgaagcccccccaaaaagcggcggccacccc

SEQ ID NO: 254551 - RNA, 85 nt, Homo sapiens
gacggaccgacggaccccaggacagaaaggggagcaggagaaccgaggcagaagggaaaggaacaaggcccccacaacacccgga

SEQ ID NO: 254552 - RNA, 79 nt, Homo sapiens
gaagaacccaagccaaagcccaggacgaccgaaaacccagccagacaaaagagaagcagaggagcgaagaaagagagag

SEQ ID NO: 254553 - RNA, 71 nt, Homo sapiens
gacaagcgacagacgcgagcccggaaaggaacgaagcagagcccaacaggggagccgagaagccgaagcag

SEQ ID NO: 254554 - RNA, 50 nt, Homo sapiens
ccgcgacgcaggcgcacggagacccgccggcaggcacagagagcgcgaag

SEQ ID NO: 254555 - RNA, 72 nt, Homo sapiens
acgcacaccccgcagcccggacagacccccgccccgagggcgaagagagaacacgcacggaaggaaggagac

SEQ ID NO: 254556 - RNA, 69 nt, Homo sapiens
cggccaagacggagccgaaggcaaacggagaggcaagaccagcagagggagccaccaccgaggggaaca

SEQ ID NO: 254557 - RNA, 75 nt, Homo sapiens
ccacgcccagacacgagcaagacggcaaacagccacagcaagagagagcgcccggacagcggacccacgacaagc

SEQ ID NO: 254558 - RNA, 71 nt, Homo sapiens
gagccgccccgcgcccccgccgcgccccaggcaaggaaacgaaacaggaagagggaccggaggcgcaacgc

SEQ ID NO: 254559 - RNA, 77 nt, Homo sapiens
acagacggagggccgccgcacagacagcgagacacccaccagaagagggagaagcggagacaaaggcagcaccacaa

SEQ ID NO: 254560 - RNA, 81 nt, Homo sapiens
ccaacgggccccggcaacgagggcaaggggcgcggccccgggccaccgggcgcggacccggcgcaaggaagccggagaaag

SEQ ID NO: 254561 - RNA, 53 nt, Homo sapiens
agccaggagcgggaaaagaaaacacgcacacaaaggcaacagaacaggcggaa

SEQ ID NO: 254562 - RNA, 80 nt, Homo sapiens
cggcggaaaaaggcagggaaaaaggcagccgaccccccccgcgaccccccacgaggggagggaacgcggccgacgcccga

SEQ ID NO: 254563 - RNA, 54 nt, Homo sapiens
acaggacccacgacgcacgggggcaacaacggccagcccagggagaggcacaca

SEQ ID NO: 254564 - RNA, 92 nt, Homo sapiens
cacccaacgcgccgccggcacgggccgccgcaccacagcaccgagccaagcgccaggacaaacccaacccggaagaaggagaaggggaggac

SEQ ID NO: 254565 - RNA, 81 nt, Homo sapiens
aaaaccccaaaagagaccaccaccaccggccccagcccacccaccccaggaacaacaggagacaaagaaaccagccaacag

SEQ ID NO: 254566 - RNA, 104 nt, Homo sapiens
gggacacaagacggcgaggagaagacacaaggggcccgcgagcaccgggaaacaacacgaggaggacggcacaaaaagcaccagcggggaggaacaacgaagag

SEQ ID NO: 254567 - RNA, 70 nt, Homo sapiens
ggcccgcgccgagccgacaccaccacacaccgccggggaccgcgcgagcccagcagaccgcgcaggcccg

SEQ ID NO: 254568 - RNA, 69 nt, Homo sapiens
ggacgcaccgacgagggcaaacagcgcacagcaagggcagaggaaaaggacaccgaagaaagacaacca

SEQ ID NO: 254569 - RNA, 84 nt, Homo sapiens
ccgccgcagcggcgcagcccacgccagacgaccccacccgcgccgcgacccggcacacggcacagcaggagaccaacaagacca

SEQ ID NO: 254570 - RNA, 65 nt, Homo sapiens
agccaggcccccacccaccccacaaccaaaggaaggacgacacaccccgaagagcgaagggaacg

SEQ ID NO: 254571 - RNA, 62 nt, Homo sapiens
cacgccagggagggggagagaccgacagaaacgcagacagggcagagaggaagagagaggaa

SEQ ID NO: 254572 - RNA, 82 nt, Homo sapiens
gacacagaaacggaggacaagaagccggacacaaggcgccacggcagcggcgagaaccacgccgacaacggcggaagaggaa

SEQ ID NO: 254573 - RNA, 70 nt, Homo sapiens
ccggaccgagaaagcgacaggcgagaaggacagcacaagagcagcgagaacgcggacaagcaaacaaaga

SEQ ID NO: 254574 - RNA, 78 nt, Homo sapiens
ccagaaagcggcgggggagagcgccgcaggcgcaagaaaaggcacacacacccgcaggagagcgccggagaaaggaag

SEQ ID NO: 254575 - RNA, 83 nt, Homo sapiens
ggaaggccaacgcaggaggacgcgagcccaggaggagaccagcgacccaagaagccgcccacccaaagcagcgaccccgccag

SEQ ID NO: 254576 - RNA, 62 nt, Homo sapiens
gaccaagagcgaagcgacggagcaaaggcagaggccaagcccagacccagacggacagcgga

SEQ ID NO: 254577 - RNA, 83 nt, Homo sapiens
cgcagagagagagaagcgagagcgagagggccaagcaaagggagaggcagaggcagaaggcaaacagaacaagcgcgaccgcg

SEQ ID NO: 254578 - RNA, 74 nt, Homo sapiens
caagaccccccaaccgggcggcaagcaccagcagggaaggagaagagagcaaggaccaaacacggaacagggca

SEQ ID NO: 254579 - RNA, 79 nt, Homo sapiens
ccgcgggagggcacccgggggaccccgcacacgaagagacgccgggcaccccaacacgagcgaaggcccccaaaaggcc

SEQ ID NO: 254580 - RNA, 78 nt, Homo sapiens
aagaaagccgcgaacccaaggcagacacaacaccacaagcagcaccaggagacaaagccacaaaaacaccagaaaaac

SEQ ID NO: 254581 - RNA, 73 nt, Homo sapiens
cccccacagagccaccgcccgcacgcacaggaacccccaccaaaaggacagaaggacagccaccagaggacgc

SEQ ID NO: 254582 - RNA, 73 nt, Homo sapiens
gaacacacagggaccaggagaagaggagacagacccagcacggaccccccccccagccgggcgaggccccgaa

SEQ ID NO: 254583 - RNA, 78 nt, Homo sapiens
gaggcagacaagacacccgcaggaggccaggccagagggaccaacgaaggcaaacaccacacgcagaggggggacaca

SEQ ID NO: 254584 - RNA, 61 nt, Homo sapiens
cagagaggccagggaggaagaaaggccaagcagaaacaaaaagaggagcagaagaaaccga

SEQ ID NO: 254585 - RNA, 82 nt, Homo sapiens
cccacgagaaacaaagacaaccgcaccagaaaaacagagcggggaaagaccaacaaagcaccgagaaagccaaaagaagaaa

SEQ ID NO: 254586 - RNA, 81 nt, Homo sapiens
cgaaggagcgaccgcgccggcagcgccgcgaaggcgggccgggccagcccccgccgcccgggaggcagagggagcagggca

SEQ ID NO: 254587 - RNA, 66 nt, Homo sapiens
aagacagagaagcgccgcaggggagagcggagcgaagcgaacaaaaagcagcaaaccggaccaccc

SEQ ID NO: 254588 - RNA, 73 nt, Homo sapiens
cgcagggcgcccccggagggccagacaaggggaacacaagaggagagaaggggaccgcagggagaaaaggcca

SEQ ID NO: 254589 - RNA, 79 nt, Homo sapiens
aaagaaggcggcgaagcaaggagaaaaggagaccgcaagcagagcgacaagcaacgcaaaaacaggcggggcgcgcgcg

SEQ ID NO: 254590 - RNA, 84 nt, Homo sapiens
cgcgcacagacaacccccacaggcagcaccgggaccggaggcccagagcgacggacggagaaccaggcccgcagcagcagccac

SEQ ID NO: 254591 - RNA, 71 nt, Homo sapiens
ggccggccagcgccggaaaccaacaagacgaaagaggagagaacgaccccagggcaggaacaagagagccc

SEQ ID NO: 254592 - RNA, 114 nt, Homo sapiens
ggaaaaaggaccacaagccacgaagaagagccggaacaagcaacggcagaaaaggaggcggggcaggcccaaccgacacacacgccacacccaaaagccagcagcaccaacccc

SEQ ID NO: 254593 - RNA, 73 nt, Homo sapiens
gagaaacagcagaaacgcaccaggccaaagaaagagaagacgggaccgacagcgcgcgaggggggaacccacg

SEQ ID NO: 254594 - RNA, 81 nt, Homo sapiens
cgcccaagggaagaagacaccacagcggagcaacacaagcggaaagaaggaaccgccccgggcagagaccccaaaggaagg

SEQ ID NO: 254595 - RNA, 75 nt, Homo sapiens
aaaagcacaaccagccaagggccacagccaaaaaaaggcagcggaaagaagaaaagaaacggcccacaagaccca

SEQ ID NO: 254596 - RNA, 57 nt, Homo sapiens
gaagagaagaagccaggggagagcacggggcagaaggccggcccacagcccaaaaag

SEQ ID NO: 254597 - RNA, 62 nt, Homo sapiens
agagaagaagggcaacgaacaagggcaagggcgggagagcggggggccgggggccggcgcac

SEQ ID NO: 254598 - RNA, 49 nt, Homo sapiens
agaaggacccacggcgcgcgaagcaaggcgccaccggaagaaacgggag

SEQ ID NO: 254599 - RNA, 61 nt, Homo sapiens
agacgccaaacagacgacaaaaccagcagccacggcaaaagcagaccggaaaacccaccgg

SEQ ID NO: 254600 - RNA, 52 nt, Homo sapiens
cagcaaaccacccagcaggaaaccaagagaagacaaggcgggcaacgaccca

SEQ ID NO: 254601 - RNA, 89 nt, Homo sapiens
agaccggagagccgcaggacggcgcggcagagccccgacgccacagaacgcccgggaccgggagcccgggaccgggagccggggggcca

SEQ ID NO: 254602 - RNA, 64 nt, Homo sapiens
ccacggaccagggccaaagcaaggccaccccgaggggcgaggcggaaggggccccgcagggcgg

SEQ ID NO: 254603 - RNA, 61 nt, Homo sapiens
cagcgcagcgacgagagggccggcacagccacaccgagaagaccggcccaagaaccccacc

SEQ ID NO: 254604 - RNA, 111 nt, Homo sapiens
caccccgggagcaaggagaagagccgggcagggagcaggcagcccaacgcacgccagcgacggcacaggcgaggaaagacaacagccgagcacaaagaacccaggaaccga

SEQ ID NO: 254605 - RNA, 101 nt, Homo sapiens
ggagaccccacggagcgggcgacgagcgacccgggagacacgacggagcaggacacgagacacaggccgcacgcacgcgggggaccccaagggaaaccggc

SEQ ID NO: 254606 - RNA, 70 nt, Homo sapiens
cgacccaaaggagaggaaggaacaaggcgcaaaaacagaagcacagaagggagccaaagaacaacacgca

SEQ ID NO: 254607 - RNA, 78 nt, Homo sapiens
aaaagccacccaggccggccagcacccaccgagaaggccagcagggaaaggccccccgggcaagccagcaccgagaaa

SEQ ID NO: 254608 - RNA, 98 nt, Homo sapiens
gcgaaccgggcaaggggaaaggggggccggcgcagacggccaaaggacgggacaaagggcccaagggagcagacaggagaaaacgacaaagggaaaag

SEQ ID NO: 254609 - RNA, 81 nt, Homo sapiens
ggagggcgaaccgccccacgagaccaaacgccaacgaaccacgcccgacaagcagagccagcaggcgagaagccacaacgc

SEQ ID NO: 254610 - RNA, 80 nt, Homo sapiens
cccgcacgaggcagagaacaagacggacgcaccgacggaacccaggagagagagaaagggaacgggacaagcagaacgca

SEQ ID NO: 254611 - RNA, 76 nt, Homo sapiens
gaaacccccacgggcgcaaaggacaccccagccaccgggcagacccccccggcacacccggggggaagcacacgcc

SEQ ID NO: 254612 - RNA, 71 nt, Homo sapiens
ggagccaggccgaggggcggacgcggccggcgccggcgaaagcaacgaagggacgccagaacaagagaagg

SEQ ID NO: 254613 - RNA, 56 nt, Homo sapiens
aacggagaccggaaggagaggacccgccggcggcccgccgccccacccgcccacca

SEQ ID NO: 254614 - RNA, 66 nt, Homo sapiens
gaggagaacgaacaccggaccgccagcccgccccgcgcagcagcacacagaagaaacaggacagac

SEQ ID NO: 254615 - RNA, 76 nt, Homo sapiens
cccggccgaaaaggcgaccgccccaaggaaccacggagcaggccgggcccgccagggcacgcgcccgccacgggaa

SEQ ID NO: 254616 - RNA, 77 nt, Homo sapiens
ccgcgcccgccgcgcggagcgcccccgcgccccgcaccagagcggggcaccgagccggggagaaaagaagcagccca

SEQ ID NO: 254617 - RNA, 79 nt, Homo sapiens
ccagcgcaaaggaagaggaagaagaagccacaaacgaaggagaccagaaccaacacagcccccaggcgggccagaagac

SEQ ID NO: 254618 - RNA, 86 nt, Homo sapiens
aagagagaccagaaaggacaggacggcggaaaacaccgggaggcacgggccaagcacaccacagagcagcgaaaaagggacacggc

SEQ ID NO: 254619 - RNA, 83 nt, Homo sapiens
aaagagcagaggaagaggaaagcgaacggcgcagaaaacccacggccccaccacagcgagccaggagcggcaaaggcgcgcag

SEQ ID NO: 254620 - RNA, 78 nt, Homo sapiens
gaagcccaccacaaaaacgaaggcggcggagacaggggccaggccaggggcaggggaagcacccaaccaacgagcggg

SEQ ID NO: 254621 - RNA, 58 nt, Homo sapiens
cgaggccggaagacgccgaagagcgcacaacaaacagcaggccgggggaggaggcggg

SEQ ID NO: 254622 - RNA, 74 nt, Homo sapiens
agaagagacgcggaccacgccggcacagccacaccgagaagaccggcccaagaaccccaccgcccgaagacagc

SEQ ID NO: 254623 - RNA, 68 nt, Homo sapiens
gacggcggggccgggcccccggccgcaagcaggcacagcaagcagaagcacggcagccagggaaggcc

SEQ ID NO: 254624 - RNA, 85 nt, Homo sapiens
gggaggacccacccggcagaccccccacaccccccagccacgcgaacaccgggcccccccaacgagccagaccaacccccccgcc

SEQ ID NO: 254625 - RNA, 72 nt, Homo sapiens
aaagcagaaccacaaaggcgggaagaggcagaggacagaaggaacagagaccgccaggggaaagccccgcga

SEQ ID NO: 254626 - RNA, 76 nt, Homo sapiens
aggggaaccagcaccgcagcaaccacccagaaacccccccaggaaaccgaagaaccagccccggggacgaaagaga

SEQ ID NO: 254627 - RNA, 83 nt, Homo sapiens
gggacacgcaggagagccccgcgaccacggcacacgcgacaggacgcggcagagcgcaagccgacacgaggcgggccacagcc

SEQ ID NO: 254628 - RNA, 79 nt, Homo sapiens
ggcacagccccaaaagaaaggcagcaacgaacgaggaagggagcgggccagagacaaacaccgccccgaagacccaaag

SEQ ID NO: 254629 - RNA, 74 nt, Homo sapiens
ccagaaacacaagcacgagcaacccacccggcagaccaacccccagcccagcccgggcaagccccacgaagcca

SEQ ID NO: 254630 - RNA, 81 nt, Homo sapiens
gccgagcgagcacccagcccgggccaggaggcgggccgaaccacccaagggaacgagaacgccaagaaggaccgaaggaag

SEQ ID NO: 254631 - RNA, 82 nt, Homo sapiens
acagcccccaccaacacaggaagcaggaaaaaccagccgcaagaacggcacacgcgagaacaaaccccaccagaaaccgcca

SEQ ID NO: 254632 - RNA, 76 nt, Homo sapiens
ccccgggaaccacccgcgcccccaggcacagcaacggacgaggagaacaggaacccggccgcacgcccgcgaaggc

SEQ ID NO: 254633 - RNA, 83 nt, Homo sapiens
ccagccaccagcagaacaaagccaaggggagccacacaaaaggccgacccggccggccgcgccagagcccagcgcgcccgcgc

SEQ ID NO: 254634 - RNA, 71 nt, Homo sapiens
agacacggacggcaccaggcagagggcaccacagacaagaaagcccccacggaaggccacgagggcggacc

SEQ ID NO: 254635 - RNA, 97 nt, Homo sapiens
gcggaagaggccacgaggcgcacaccgccagcccaagaaaaaggaacaagcacaaggaagagcccacagaaaagacccccacacgagaaggaacggg

SEQ ID NO: 254636 - RNA, 87 nt, Homo sapiens
gggggcaaacccgagagaacgggccagacagaagccacaaggggaagaggcccccaacccccccacaccaccagcacgccaggcccc

SEQ ID NO: 254637 - RNA, 92 nt, Homo sapiens
caaccgagagaccagcaaggaaccaaagcacacagagcaaggcaaccgaccagagaggaggccaacagccaaaaaccaagaaagaaagaaaa

SEQ ID NO: 254638 - RNA, 88 nt, Homo sapiens
cggcgaacacaccgcccagccgcccacgagagcagccgcaacggacggaggacaggaaggaggcacacggaagcaggcgaacacggag

SEQ ID NO: 254639 - RNA, 60 nt, Homo sapiens
agcggagagcggcgacgcagccggaggcagaaccacgagcccagccaaggccgcacaagc

SEQ ID NO: 254640 - RNA, 89 nt, Homo sapiens
aacaacccccacaccaaaccaacaccccgccggcacggcccgcccgccggccgaaccgcccggaaccgggaggcgacaagaaagaaaac

SEQ ID NO: 254641 - RNA, 85 nt, Homo sapiens
gaaggaggaggaggaggagcgaagaggaaagggagcaagcaggaccccggccaaccggcccagacagaggcccgagaggggaaaa

SEQ ID NO: 254642 - RNA, 82 nt, Homo sapiens
ggccgggcggcgcggccgcccgggccgggccccaccggacgcagccgcgaacgcggccgggaggcagagcgaggcaccggcg

SEQ ID NO: 254643 - RNA, 72 nt, Homo sapiens
gagggccaggcagcccaggagaccagcaaagaaccaggaacaccacccgcagccccagcacacagaccagag

SEQ ID NO: 254644 - RNA, 71 nt, Homo sapiens
agagccaaggaaaaacagcaagaacccaaaaggacgccacaacacggaacggagccacccgggcggcgggc

SEQ ID NO: 254645 - RNA, 83 nt, Homo sapiens
agcagggggagcagggcgagagggcaccgcggacggggccgcccagagaaggagggggcagagcacggcaggcagaaggggcc

SEQ ID NO: 254646 - RNA, 69 nt, Homo sapiens
acggagggcaggagagagagcaggcagaagaaggaacagagagagccggagaggacagccaccccacac

SEQ ID NO: 254647 - RNA, 85 nt, Homo sapiens
gggccgaccgggcgcaccgaccaggccccaaagccccaaggcgacaagaccggaccggagacgagagggccccaaagggaccagg

SEQ ID NO: 254648 - RNA, 70 nt, Homo sapiens
aagcagcagagaagaaaaacagaaccacacaaacgcggcccagcccaaccagcaccccccccaaggcccc

SEQ ID NO: 254649 - RNA, 68 nt, Homo sapiens
gaaccaggagagcaagagacaagaggcagccaggagacggaggaagcccagcaccacgaaggaaggca

SEQ ID NO: 254650 - RNA, 78 nt, Homo sapiens
ccagggcccgaagagggaagacacgcggaaacaggacccagcgaaaagagaagacgggcaaggaacgggaggggccga

SEQ ID NO: 254651 - RNA, 79 nt, Homo sapiens
agccacgcgagccccccagcacccaacaaggacaaggacagcgaaaccccacgacagggccgaggggaggcagacacgc

SEQ ID NO: 254652 - RNA, 79 nt, Homo sapiens
ccagccaaacaaaaaggaaaggagacaagcagagacgaaccaggcaaagcacccagagggccacacgggcaggacaccc

SEQ ID NO: 254653 - RNA, 60 nt, Homo sapiens
cggcgcccgggaggagccgcgggaagaaagagcggcccgcgcagaacagcggggagaaaa

SEQ ID NO: 254654 - RNA, 74 nt, Homo sapiens
gaacaccgaaaaccgccgaagcagcaaaggaagcagagcaggccgcaggagggaagcgcacggaaaccgccccg

SEQ ID NO: 254655 - RNA, 82 nt, Homo sapiens
ccgccgacaaggcgcacaacaggacagcggccgaagccagagccggggcggcgccaggccccacacgggcgcggcgcggcag

SEQ ID NO: 254656 - RNA, 83 nt, Homo sapiens
ggggcagaagaagagcagaaaaagcagccaggaaccaagaaaacggccacaaggcgaacaaccagccccaaccacagaccgac

SEQ ID NO: 254657 - RNA, 68 nt, Homo sapiens
gcgaaaagaaacccaagaaggccggagaaggcgacggccgaaccacaaagcaaaccagacagaaccgg

SEQ ID NO: 254658 - RNA, 106 nt, Homo sapiens
cggaagacaggccacccagcggggagcacggcgagcagccaggccaggagagaagccaaggcgcgagaaggcaccggggcaaacggcacacgaagcacggaacacc

SEQ ID NO: 254659 - RNA, 81 nt, Homo sapiens
cgcacaaaaaagggcagaagagaagcaggaaggaggcagaggcacaccgaaagaacaacaagaaggagaaagacacaacga

SEQ ID NO: 254660 - RNA, 72 nt, Homo sapiens
ggacacgggagagaggccgggcgagcagcaggagcaccggcccaagaaacagaaggaagaaaccaaacgaaa

SEQ ID NO: 254661 - RNA, 69 nt, Homo sapiens
aaccgaaccaagaagacccggaagcccaagaagggggaccggcccaaaaagcccccccgccaccagccc

SEQ ID NO: 254662 - RNA, 77 nt, Homo sapiens
aaagaacgacgccagggaggaggcaccaagcaagaaaagccaaggaccacaccaccgaggaaaacacggcaccagga

SEQ ID NO: 254663 - RNA, 80 nt, Homo sapiens
ccaggagaagcacaggaagacaggcaggaaccgcaacaggaggccagagacagagaaacggcgccgagaagggaaaacca

SEQ ID NO: 254664 - RNA, 81 nt, Homo sapiens
cccgcaccaccgcacaccgagcagcacccaggccacagaggaggaaagagaggggaaagaagcagccaagccccaaggaac

SEQ ID NO: 254665 - RNA, 57 nt, Homo sapiens
cgggccgcggccgccccagaagggccaagggacgcacggcaagaagcaagcaaccag

SEQ ID NO: 254666 - RNA, 75 nt, Homo sapiens
gaaaccaagacagcccaaacgccccacgaccaggacagaccgaaaagcaacaacaacggagaagagcaaagaacc

SEQ ID NO: 254667 - RNA, 78 nt, Homo sapiens
ccagccaaggcaaagggggaacaggcacacgggggcaaggagccacaagccacgacccagaaggcagcggggaccaaa

SEQ ID NO: 254668 - RNA, 74 nt, Homo sapiens
cccccggacagacgccgacgcccagggccaggccgccacgaaaacaagaaagaaccccacagccagcagaaaca

SEQ ID NO: 254669 - RNA, 80 nt, Homo sapiens
cgcgcgcgggaagcagcaccaagcacggccaacgccggcacagggaacaagcagaaagcacgaacaacgagaacaagaca

SEQ ID NO: 254670 - RNA, 78 nt, Homo sapiens
aggcgagagcgcaggggaccaaggaggcaaaacgacgacaggggaagaacacaaggcacacaaagccacccaaaagca

SEQ ID NO: 254671 - RNA, 80 nt, Homo sapiens
cagcccggggccccgacagaccaccccgccaacgcggcaccgcagaacgccacaaccagcgagggaaggaaacgcaagag

SEQ ID NO: 254672 - RNA, 75 nt, Homo sapiens
cgggaccggccgggaagcggccaccgacacgcagcagcggccagacaacggcaagcggagaagagcaaggccgaa

SEQ ID NO: 254673 - RNA, 69 nt, Homo sapiens
ggcaaccaaaaaccccccccaaaaacgcggggagacagccagagaagagacgaagcgcacagacaaagc

SEQ ID NO: 254674 - RNA, 79 nt, Homo sapiens
gggaagcggcccccgggcgcgggcgaggccgggcggcgccgccccaccggacccgcaggcagaagcccacaggacaaaa

SEQ ID NO: 254675 - RNA, 74 nt, Homo sapiens
gagaaagaggacaccggaccgcagggcaggagcccgagccagggcccagcgagaaccgcgcacagaaaccagag

SEQ ID NO: 254676 - RNA, 81 nt, Homo sapiens
cagacaaggacgaagacaagagggggggagaaacaaaccgacaagggaaagggccgaggagcccaagagaagaaaaggaga

SEQ ID NO: 254677 - RNA, 72 nt, Homo sapiens
ccacccagacaagagcaccacgggcaggaaggcagcgcacgacagcaaaaggcccacagacaagccgccccc

SEQ ID NO: 254678 - RNA, 70 nt, Homo sapiens
gaccggcccacaacacgcccggcaaagacaggagagacaacggaggcaagaaagacggagaagcgagaag

SEQ ID NO: 254679 - RNA, 78 nt, Homo sapiens
gacgaagagggcgccgccacggccccacagcgcgcccggagaaagcacacgagcagacaagccaggcagcccagacag

SEQ ID NO: 254680 - RNA, 115 nt, Homo sapiens
cagcaggaagaccgggaggaaagacagcggcacacgggggagccggaagaaccaggcggacggaggaagccccaagaccacaaagacaaaaccagcccgagcacacaacccacac

SEQ ID NO: 254681 - RNA, 80 nt, Homo sapiens
ggccagcagggacaggaaaaggagccaggaacccaggacaccacaggcgagccccgaaccaggccgcagaaggaacggca

SEQ ID NO: 254682 - RNA, 79 nt, Homo sapiens
gcgcgcgcccagcgccgccccgcgcgcgcccgccacggcgccgagccgcggccgacaaaccaacacagcgggaaagaaa

SEQ ID NO: 254683 - RNA, 77 nt, Homo sapiens
ggggaaggcacggacgcaacacggaacagacgcacaggcccaggggaagacagggagcagccacccccggggggccc

SEQ ID NO: 254684 - RNA, 73 nt, Homo sapiens
aaacacgcaagaccgaggacgcaagcaagcaccaaggaaggcggagcagcaagccgagagcagcgccggccag

SEQ ID NO: 254685 - RNA, 81 nt, Homo sapiens
gaccggacaggcgccgcgccgccgcacgggaccgccgagccacaccggcacgagccagggagccgccgggaccggcccggg

SEQ ID NO: 254686 - RNA, 39 nt, Homo sapiens
acgaggagccaccaagagccaaccacgcagcgaagaagg

SEQ ID NO: 254687 - RNA, 57 nt, Homo sapiens
ggcccagggaggcaggggcagaaacagagaaggaacagggaggagccaagagggccc

SEQ ID NO: 254688 - RNA, 78 nt, Homo sapiens
gcggcgccggcggcgcgcgacccccgcgcagggcccggccaggccccaccgccacaagcaggggaacaccgccaaccc

SEQ ID NO: 254689 - RNA, 60 nt, Homo sapiens
gcgcgaacccgaaagagagagcccgaggggaaggcgcaggaaggacccacaagaccaagc

SEQ ID NO: 254690 - RNA, 64 nt, Homo sapiens
aaggaccaagaaccagaggcaccacacacagcgacaagagaacgcacagaccagccggccaaaa

SEQ ID NO: 254691 - RNA, 68 nt, Homo sapiens
ggcggcggacggcgcgcgcccgaggcgaggaggagcgcggcggaacaaaccagccccaggaaagaagg

SEQ ID NO: 254692 - RNA, 75 nt, Homo sapiens
gaacagccgaaacacggcaaagaaccaagacaagagaaaccagaagaaaccaggaaagaacagccaccggagaac

SEQ ID NO: 254693 - RNA, 82 nt, Homo sapiens
ggagcgcgaaggccgggacccggccccggcccacaggggggggcaaacccgagagaacgggcagcaaaacggacggaccaga

SEQ ID NO: 254694 - RNA, 61 nt, Homo sapiens
acaccagaggagagaagccgaaagaacaggacccaggggccagaaggagaggacagccgca

SEQ ID NO: 254695 - RNA, 38 nt, Homo sapiens
aaaacgacggggcacacaagcgccgcgcgggaggccag

SEQ ID NO: 254696 - RNA, 72 nt, Homo sapiens
cggagagccggggaaggaagcagaacggaaaaagcaaaagcgagaagaagagaaaaggaagaaccacgaaac

SEQ ID NO: 254697 - RNA, 78 nt, Homo sapiens
gacgagaagccccaacagcacggcgggccccagcccgcagagccccgagaggggcgcgcagaaacgggaagaaacacg

SEQ ID NO: 254698 - RNA, 76 nt, Homo sapiens
caggggaggaccaagcacgccccaaagacgagaaaaggagaagacaggaaagaccgagccagcgacgaagcccaca

SEQ ID NO: 254699 - RNA, 76 nt, Homo sapiens
ggccccccgaacagcaggcgccaccagcccggaggcgagaaccacgccgacaacggcggaagaggaacgggaacgg

SEQ ID NO: 254700 - RNA, 92 nt, Homo sapiens
ggcagcggcggaggcgacggggcggcccggagccggcgcgaaccggcccccgcagcgggacccggaagccgaacggggaggaggcaagaaag

SEQ ID NO: 254701 - RNA, 78 nt, Homo sapiens
cggggacgcacggaccaaaaacccgcaacagcccccgcccaagggagaccagaccccccgccaccacccacaccacgc

SEQ ID NO: 254702 - RNA, 82 nt, Homo sapiens
agaaccgaccggcgccccagggaaacgcggaggccggagcgacgcgcggagcgagaggcccgaaaaagcccaagacagcaga

SEQ ID NO: 254703 - RNA, 81 nt, Homo sapiens
aaaaggcggcgcccgaagaaggcaagagcagaggccccagaccgccaagaggcacaggaaaggaagccgggggaccaacaa

SEQ ID NO: 254704 - RNA, 77 nt, Homo sapiens
agagcacgggcccccggacgcgagcccgcccccgagcgcacggggcaggcgggcagcgagccaaggccggacagcgc

SEQ ID NO: 254705 - RNA, 71 nt, Homo sapiens
cagccaggcccagccaggaggaagcaagaaacagaccggaggccagagaggagcccacccccaacagaaga

SEQ ID NO: 254706 - RNA, 63 nt, Homo sapiens
gagcgcgggaaagcagcggcaggcacaaggcgcggccaacagagacaggagaaagagagagag

SEQ ID NO: 254707 - RNA, 70 nt, Homo sapiens
cagaagcaccgcacacgcccaacacaagaagcacccacaaaagcgaaaagccagacaggaacaccagaca

SEQ ID NO: 254708 - RNA, 39 nt, Homo sapiens
ggaagacggagagacgacgcacagcagccgcgacgcaga

SEQ ID NO: 254709 - RNA, 77 nt, Homo sapiens
accacgaaggaggagcccagcagaagaaaacggacgaggggccgcagcgccacgcccgccacaaccaccggaacgag

SEQ ID NO: 254710 - RNA, 55 nt, Homo sapiens
accacggcgcgccccggccggaggaagaacgaagcgcgcagaaaacacagaaggc

SEQ ID NO: 254711 - RNA, 70 nt, Homo sapiens
agcccgccaaagccccggaccgccaagaagaagacacggggccgacgcgaggacccacccacggcgaaca

SEQ ID NO: 254712 - RNA, 55 nt, Homo sapiens
agaccggcacccggcaaccagaaacacaggccaaggcgccccggcaaggccaccg

SEQ ID NO: 254713 - RNA, 54 nt, Homo sapiens
gacaggccccagccgcagaccgggccgcacaggcaaggcacaagagaccacggc

SEQ ID NO: 254714 - RNA, 76 nt, Homo sapiens
cggcgcggcggcggcgccgcgccccgcccgcgggagagggacaaccacaccgaaggccaccccaagaagaggggac

SEQ ID NO: 254715 - RNA, 74 nt, Homo sapiens
caaggggacagcacccggccccaacggaacagacccgggaagccagggagaagaggagccacgcaaacggagcg

SEQ ID NO: 254716 - RNA, 83 nt, Homo sapiens
accgcggagcaaggaaaagacccggaaagaagagacacagaggagccacacccccaggacacaccggaacaaagaaaaccaaa

SEQ ID NO: 254717 - RNA, 83 nt, Homo sapiens
agcccccgcgcgcccggccggcccggagcaccgagccgcggcacggaggagggccagcgacgaggagcggggcccccgacgga

SEQ ID NO: 254718 - RNA, 71 nt, Homo sapiens
caacagccggcgccgccacggagaaaacgggaaacggaaaaagagcgcagaggaaggccagcaaggccagg

SEQ ID NO: 254719 - RNA, 64 nt, Homo sapiens
cgggaaaaggcaaggcacaacgccacgaggcacaccccagcaaggaaggaggcacagcaagaag

SEQ ID NO: 254720 - RNA, 75 nt, Homo sapiens
gcggacgggcgcccagccaggagggagcaaaggaggcgcgcccaccgcgagcggaaaagaccccaccaaaacgcc

SEQ ID NO: 254721 - RNA, 36 nt, Homo sapiens
ccccagccagggaacgcaagagagagaagaagccgg

SEQ ID NO: 254722 - RNA, 80 nt, Homo sapiens
gagcagaccggcccgaccgcccacagacccaaacaaaggagggaaaaccccgaccaaaagaagcaggacacaggagaagc

SEQ ID NO: 254723 - RNA, 82 nt, Homo sapiens
agagcgcggaacaggacgccccgagagggagcacaggccagccccggaccgggaagaaccggagcaggagcggggaaggggc

SEQ ID NO: 254724 - RNA, 80 nt, Homo sapiens
acgggaggagcgcgagcaggagacgacaggaggcacgagacgacaaggagaggccagcggaagccccaaaaaaagaagag

SEQ ID NO: 254725 - RNA, 81 nt, Homo sapiens
gaagacccgccagaacaaaacaagaaaaacagccagacagacgcacacaggaagacagcaacccagacacacggaccacaa

SEQ ID NO: 254726 - RNA, 74 nt, Homo sapiens
cccccaaagagcgggaacaggccagccaaggagggggagaggggaaggagagccacaccagaagagggcccagg

SEQ ID NO: 254727 - RNA, 38 nt, Homo sapiens
gcagccgagcgcgaggcccacaaacccagagaagagag

SEQ ID NO: 254728 - RNA, 76 nt, Homo sapiens
ccggaaaggcggggagccaacgagcgacgccgacaaaggaggaaaagaagagaccagcgcagcagacaaacaggaa

SEQ ID NO: 254729 - RNA, 77 nt, Homo sapiens
gacaccaccgcagcgacgagcaggaggcagcacggcaggagacgaggagaggacagcaggacacccggaccccaccg

SEQ ID NO: 254730 - RNA, 108 nt, Homo sapiens
gagccgcggcccggaacggggcgccgccccgggccccccagcagaagaccccggcggacacagccggaaccaaaaagaagccccagagccggggccaggagccccaag

SEQ ID NO: 254731 - RNA, 76 nt, Homo sapiens
gagagccccagcgaggaagcacaccaccaaggaacgggcgcagcgagaggagaaagcaggaagagggacaagcaaa

SEQ ID NO: 254732 - RNA, 73 nt, Homo sapiens
accccagacaaaagaccgggggaggaaagaagggggcgaggagaagcaaaacacagaggaaaagggaaagagg

SEQ ID NO: 254733 - RNA, 74 nt, Homo sapiens
cggaaaccacggagacgcagggccagagaggcagcagaagcgcaacaaacgaggccccacacccaagggagaag

SEQ ID NO: 254734 - RNA, 75 nt, Homo sapiens
cgcaagggggaagagcgcccggcccggaggacaagaacgggagggcagaaccggcgcaaggagcaacgaagacag

SEQ ID NO: 254735 - RNA, 77 nt, Homo sapiens
gcgaagcggccaaagccgcccagacggccaccggcgggaggaacaaaaggccagacggagagcgacaccaaagacgg

SEQ ID NO: 254736 - RNA, 36 nt, Homo sapiens
aagccgaggcagcccagcaggaggcagcagcagcga

SEQ ID NO: 254737 - RNA, 74 nt, Homo sapiens
gaagacagagccacaggacagacccgcccgcagccagaaccggcggccggaacgcgggaaaacgggcaccccag

SEQ ID NO: 254738 - RNA, 79 nt, Homo sapiens
agagaacgcgagaccggggcgaaacaagccagacggacgacggggaaccccgccaagacaagaaagggggccgaagggg

SEQ ID NO: 254739 - RNA, 58 nt, Homo sapiens
ggcgaggcgcagaaaccccggacaaggcacgccagacgggcacggagaaaagagagcc

SEQ ID NO: 254740 - RNA, 81 nt, Homo sapiens
cagacacgggcgaggacaacgcacaaccgaagagccaagcccccccagcccacccacgagcgcagcaaggaggcaacaaag

SEQ ID NO: 254741 - RNA, 76 nt, Homo sapiens
cggccgcgcgcgcggcggaagggccagacagcaaggcggcagacgcggacagaagaaaagcccccccggacagaaa

SEQ ID NO: 254742 - RNA, 79 nt, Homo sapiens
gcgagcaacagcagcgaagcgcaggaggacccaagagcccccccccaaaggggcaaggcaggcagcgcccggagccgga

SEQ ID NO: 254743 - RNA, 40 nt, Homo sapiens
gaggggcccggcggcggggagacaccgcagaccgcgccaa

SEQ ID NO: 254744 - RNA, 74 nt, Homo sapiens
aacggcagagcaggccgcggcgacccagcgaggccaccagccggaagaggacacaagaaggaaacgaaccccgc

SEQ ID NO: 254745 - RNA, 78 nt, Homo sapiens
accagccagagaccgagggaagggggccaaggccacaggggaaagaggaaccccgagcccccggggcaaggccaccca

SEQ ID NO: 254746 - RNA, 71 nt, Homo sapiens
gaaccgagagaggaagacgcacagccccgagggcagaaccaacccgccccccccagggaaccccgcagcca

SEQ ID NO: 254747 - RNA, 55 nt, Homo sapiens
gcgcgcgacccccgcgcaggaacccaagccagaccgcccgagaaagacaggaaga

SEQ ID NO: 254748 - RNA, 73 nt, Homo sapiens
caaagaaagggaagagacacaaggccaccccaccacaaccgaaagacaccagggaaacaaccgcccgccgccc

SEQ ID NO: 254749 - RNA, 76 nt, Homo sapiens
cgaggcgggcgggccggcgagcgcagcgcgaccgggaggcccagccccaccaaagccaccaagccaagaccagcag

SEQ ID NO: 254750 - RNA, 87 nt, Homo sapiens
cagccggggcgggagccgcccggggcagggccgggagagcgggaaagaggaaagaaaaccaggagaacaacgggaacgaaagaccaa

SEQ ID NO: 254751 - RNA, 67 nt, Homo sapiens
gccaacaaagcaagaagcagcaggcaaaagcaacaacggagaccagagaacacacaggaaccaaaaa

SEQ ID NO: 254752 - RNA, 74 nt, Homo sapiens
gaagcaagggacaagggccacacccccaggcccccgaggagggaacaagccagaccaggaggagaaaacaaaaa

SEQ ID NO: 254753 - RNA, 78 nt, Homo sapiens
agaggagccaaagcagcagaaggcaagaacagaggcagaagagaggggcacaagaccgaaagagcaggcaagcaaaag

SEQ ID NO: 254754 - RNA, 66 nt, Homo sapiens
gcccccagccgcagccacaacaccggcaggaaccaccaggacagagcgagagccccaacgagagag

SEQ ID NO: 254755 - RNA, 78 nt, Homo sapiens
gacagaggggcaggagcagagagcgagccaaggcggcaagccagaccgggagggagggccgaccgaggggaccagcaa

SEQ ID NO: 254756 - RNA, 73 nt, Homo sapiens
cgagcgcccccaacacgacggccgggcgcccgggaggccgcgagagaagagggcggacaccgcccgcgcgcgg

SEQ ID NO: 254757 - RNA, 80 nt, Homo sapiens
cagcaggcgcggcacggcaacccacagacaacaagggaaaccagccaaccaggggcaccagaccaaggagaacgagggcc

SEQ ID NO: 254758 - RNA, 74 nt, Homo sapiens
ccccagcagcgcggaggccgccgcagcaaggagccaagaggccacgacagaagaacagcaacagaacacaccaa

SEQ ID NO: 254759 - RNA, 69 nt, Homo sapiens
gacagaagacaaacggaacagccgacaaaacgaagagggaaacagccacaagaggagcgcccggcccag

SEQ ID NO: 254760 - RNA, 70 nt, Homo sapiens
ggggcggagaagggcagggcgagcgcccccgccagggccgaccagacaacggcaagcggagaagagcaag

SEQ ID NO: 254761 - RNA, 61 nt, Homo sapiens
ggccagccacaggaggaaaggccagaccacagaaggcccacacccacagggaacggcggca

SEQ ID NO: 254762 - RNA, 70 nt, Homo sapiens
cccaggagaaaaagcacaagaaggcaggccacgaagaaagcagggcagggcggggaacagaccagggaag

SEQ ID NO: 254763 - RNA, 62 nt, Homo sapiens
cgagcagccgggagacaccgccaccgccagcccccacagccagaaaaaagacagaccgagcg

SEQ ID NO: 254764 - RNA, 61 nt, Homo sapiens
ggccaagaagaacaagcgaggcccgggggacaacggaaacaacagaccagccacaccacag

SEQ ID NO: 254765 - RNA, 73 nt, Homo sapiens
aacccagccgcgcagcccgaagagacccaacagaggaagccgcaagaaacgggacgacaggaaggccagagaa

SEQ ID NO: 254766 - RNA, 66 nt, Homo sapiens
cggaaccggagccgggcgggcagggacgcggcgccgagagccggaaaccccccaggcaagaggcgc

SEQ ID NO: 254767 - RNA, 116 nt, Homo sapiens
gaaaagaaagcacaaaaaagccaaggagcgggagaaacacggacaaaagaaagcaagaccccgagggaagaccaacagggaagagaggggacaccgaacaggaaagcagaaacaag

SEQ ID NO: 254768 - RNA, 85 nt, Homo sapiens
cgcaagcgggcgccaggacggggaggacgacgaggagaggaggagagaccgcccacaccaccacgaaggcccaccgcggccccga

SEQ ID NO: 254769 - RNA, 77 nt, Homo sapiens
ggagaccaggaagggaaagccccagacagacgaacgcaaccccaagaggggagacgagaaggaaaaccgcaggcaga

SEQ ID NO: 254770 - RNA, 64 nt, Homo sapiens
ccgaacaacagccggacaacacgcacggaacaaaggacagggacaagcgcacagcggagaaagc

SEQ ID NO: 254771 - RNA, 85 nt, Homo sapiens
ccaaagaagcagaaagagcagaaaggagggggcgagaaggcgggaagccgaaggcagccacagaaacacggccagggagcccacc

SEQ ID NO: 254772 - RNA, 80 nt, Homo sapiens
caaaaagaccaagaagaaccacaaggccagaacgcccgggaagacaggggaagaacacaaggggagcagaaacagccagg

SEQ ID NO: 254773 - RNA, 78 nt, Homo sapiens
caagcccacggcgccaccgggggaagggccggcgcaccgacggccaacgggggacgggagcagcggaaggcccagacc

SEQ ID NO: 254774 - RNA, 77 nt, Homo sapiens
aaacgccggaagccccaacaccagagcgcacaccggggcaaaagggacaagggacgcaaggccgacagcgcgccgag

SEQ ID NO: 254775 - RNA, 78 nt, Homo sapiens
cacagccaaagaagaaagggagcagaaggagacagcaaagggacaaacaccgagaaaagaggaaacgagacccagaaa

SEQ ID NO: 254776 - RNA, 78 nt, Homo sapiens
gcggacggaggagcaggcgagaagagaaggcaaccagggagaggagccgcaagccgaacaaggacccgagacaaggaa

SEQ ID NO: 254777 - RNA, 48 nt, Homo sapiens
gcgggggaccgaacaaggcaaaaggggagcagccggccacaccgcagg

SEQ ID NO: 254778 - RNA, 70 nt, Homo sapiens
gaggcccaacaacaacagaagaagagcagaacccaggcaggggaggcagaagagagccggaggaccgaag

SEQ ID NO: 254779 - RNA, 35 nt, Homo sapiens
agaacacgccaaggcaagaccgccgcgcggaaagg

SEQ ID NO: 254780 - RNA, 106 nt, Homo sapiens
gcccccaggccgcgccgagcccgccgcgcgggcccgcccgacgcggaagacagaaaccccagaaccagcgagacagggggaaggccccggggccaggaaccacaac

SEQ ID NO: 254781 - RNA, 75 nt, Homo sapiens
cccggccaagagcgacaggaggagacaggcgagagaggaggacacgaccgggaagacagagaccggacagaagac

SEQ ID NO: 254782 - RNA, 80 nt, Homo sapiens
gcaaaagaccaaagaaggcaaggagagaagagaagaacagcacaggacagggaacccagaaccgcggaccacagcaaacc

SEQ ID NO: 254783 - RNA, 84 nt, Homo sapiens
gcagccgcaggggcccccgccccgggccggcggcgcggggaacggagcgaggcagcagcgccccgagccccggcggcaacaccc

SEQ ID NO: 254784 - RNA, 77 nt, Homo sapiens
gcgacgcacacccaaggccacgccggcaggaggcagaaagcaccaccggggaggcgcccagacgagcccaccacgga

SEQ ID NO: 254785 - RNA, 78 nt, Homo sapiens
gccggagcgagaccgggcggccacagccgcagggagaacccgaggcggaagaaaaagcagcacgaaggcgaggaacca

SEQ ID NO: 254786 - RNA, 78 nt, Homo sapiens
agcccgccgcgcgggcccgcccgacgcggaagcgaagaaacaggggagaaaccccgcggggaagccgaggaaagcaac

SEQ ID NO: 254787 - RNA, 83 nt, Homo sapiens
ggagaaaaagaaacgcaagaacagcgaggggaagagaacaacgcagaacaaagacgaaggcacgaaggcaacagccagagcaa

SEQ ID NO: 254788 - RNA, 73 nt, Homo sapiens
gacaccaaggacagcccgcaaggaagcacacacacccgcacgagaccccggcccgcaccgagcgagggcggca

SEQ ID NO: 254789 - RNA, 68 nt, Homo sapiens
gaccagggcggccaccgagaggccaccccaggccaccagcaagaccaccccccgagaacgagggcgga

SEQ ID NO: 254790 - RNA, 74 nt, Homo sapiens
cagaaaacagacacgggagccagaagcacgcggagaaggggccacacacgcggaagaacagccacggcagacaa

SEQ ID NO: 254791 - RNA, 75 nt, Homo sapiens
gccacaaagaggagcacgagcccagcgaccccggcccaaagcgcagggaagaacaaacaccaagggcagccggga

SEQ ID NO: 254792 - RNA, 76 nt, Homo sapiens
gcggcgcagcccacgccagacgaccccacccgcgccgcgacccggcccgggcccgccggccacaccacacgccccc

SEQ ID NO: 254793 - RNA, 69 nt, Homo sapiens
gaagacgacgcaccgcaggcagacaaaagggccaaagaagggagagagccaaggagaccgggagagaga

SEQ ID NO: 254794 - RNA, 73 nt, Homo sapiens
acccacgccaagaacagagaaaaaccaccacccaagaagccaagaggcggggaaaaaggagaagccagaacaa

SEQ ID NO: 254795 - RNA, 77 nt, Homo sapiens
ggaccagagcgccgcgcaccgcagccgcgcccgggccaaccgccccccagcagcaggcacgggcgaaccccgagccc

SEQ ID NO: 254796 - RNA, 54 nt, Homo sapiens
ccaccaggcaagacgcagcagggagagcagggcgggggagaaaaggcggaaggg

SEQ ID NO: 254797 - RNA, 59 nt, Homo sapiens
aggaagaagcaacaaaaacagcaacacaaaaagggcagagaggagggcaaaaagacaaa

SEQ ID NO: 254798 - RNA, 86 nt, Homo sapiens
gcaccaacggcagcaacagcacagcagcggggagacaacggcacagacacagagcgagccagggaggcggcccccagcagccagag

SEQ ID NO: 254799 - RNA, 77 nt, Homo sapiens
caaacgcgcaacaaccagaggaccaaggagcggcgcggggaccaaacccggagccagccaccccgacccaaagagga

SEQ ID NO: 254800 - RNA, 76 nt, Homo sapiens
aacgacagacacaaaaaagaccagaaaagaaaaacccggacacaagcgccagaaaagggacccaggggagaaaccg

SEQ ID NO: 254801 - RNA, 67 nt, Homo sapiens
gagaaggaccaagaaccaggaccaaagaccagggcccacaacggaaaaagaagggggcaaaagaaga

SEQ ID NO: 254802 - RNA, 73 nt, Homo sapiens
gcaaggcgcggccccggagagggcgccggccgagcccgggaaaacgacagcagcagcagggccggaagacgcc

SEQ ID NO: 254803 - RNA, 75 nt, Homo sapiens
agcgaaagaaaccgccaacaagcaaggaggagacaccacagcacagcacaccaggcgcgacccccgcgaagaccc

SEQ ID NO: 254804 - RNA, 71 nt, Homo sapiens
gacccgccaggaccaccacgacggcagacaacccaaacaaccaaagccggcgcggccaacaaagcacccca

SEQ ID NO: 254805 - RNA, 59 nt, Homo sapiens
acggccggaccaggcccgggaccgggagcccgggaccgggagccggggggccaccccga

SEQ ID NO: 254806 - RNA, 81 nt, Homo sapiens
ccagaccggggggaaaggcgcgggagggacaggagaacaggcacgaccccaccggcaccaccacggggacagcgaccgcag

SEQ ID NO: 254807 - RNA, 56 nt, Homo sapiens
ggagaggagccacgccgggaacccaggcagcgacaagggaggcgaggacggacaaa

SEQ ID NO: 254808 - RNA, 67 nt, Homo sapiens
gccaaagacaagaagaaaggggaaagcaagaaaaagagccaaacggagaaaccgacacacaagggag

SEQ ID NO: 254809 - RNA, 80 nt, Homo sapiens
gaagcgggccgcggcccagggagaggacgggccaaggccccgagccccggccccaaagacccaaaacagagacacccccc

SEQ ID NO: 254810 - RNA, 77 nt, Homo sapiens
ccgggggcgggggcgccagcccaccaagaagggccgagcacagcaagcaaaacgccaaaaaccccgccacaacgggg

SEQ ID NO: 254811 - RNA, 80 nt, Homo sapiens
cagcaggaagaggacacacagagaggccaaagccagagacagagcacaaagggaccaagaaaggcccagggaccaaagcc

SEQ ID NO: 254812 - RNA, 77 nt, Homo sapiens
ccggccagccacccaaggccccggacgccggagaggcaccggaccggcgccacaggagccgcagaagcaaaggcacc

SEQ ID NO: 254813 - RNA, 73 nt, Homo sapiens
agacagggaaaggaagaaagagaagacagaacagaagaaggggagagcggaaacccgggaaaacgagaaacgg

SEQ ID NO: 254814 - RNA, 74 nt, Homo sapiens
agccgcagcaggagccgcaggaggagagagaaacgcagggccagacagccaccgaaggggcccagggaccggga

SEQ ID NO: 254815 - RNA, 65 nt, Homo sapiens
agggaacaagcaggcaccgaggaaaccaccaaagcacagagcagaaggggacagggagccacaag

SEQ ID NO: 254816 - RNA, 77 nt, Homo sapiens
gaaagacaccaacgggaagaacggccaggaaggggagcaaaaggggaaaggccagacagcgcagcagccgccagcac

SEQ ID NO: 254817 - RNA, 62 nt, Homo sapiens
agcgagaaacaaagccacccagccaagaagcagcagggacgcaccaaaacggacagccgaag

SEQ ID NO: 254818 - RNA, 56 nt, Homo sapiens
gaccgggcaagaaagcacagggaaagcggcacaggaggcaaaacccaacgaggacg

SEQ ID NO: 254819 - RNA, 82 nt, Homo sapiens
gagggagcgccgaaggacaagaacagcgccgcaccagcagacagaagcgaaggggacagggggagaaccgccagggaaaccc

SEQ ID NO: 254820 - RNA, 68 nt, Homo sapiens
aagaacgacgaaacggagaagagagaagaagcaaaccgggaccggaagcaccaaggagaaaaaggacc

SEQ ID NO: 254821 - RNA, 80 nt, Homo sapiens
ccgaaaagaaacccagaagacaggggagaaacacagagcccgaaaaaggagggaacaaaagcgaagacgaagggagggag

SEQ ID NO: 254822 - RNA, 62 nt, Homo sapiens
ccgcagagcaagcgcggggaaccaaggagacgcccggcacgcagggaggcccaagcagcccc

SEQ ID NO: 254823 - RNA, 78 nt, Homo sapiens
ggaaagggcgacagcaacagccgccggcggaaggaacgcagcaccagcccacgagacccaagcaaaaccacagcagga

SEQ ID NO: 254824 - RNA, 62 nt, Homo sapiens
acgggcggaggcggggggaccggcgggcggcccacaccgggggcacgggccacagcgggcgc

SEQ ID NO: 254825 - RNA, 85 nt, Homo sapiens
aggccgaagggcacagcagccagggggcagacgcccgcagcagcgccaaagagcagagccccccaagagaacccagggggagcca

SEQ ID NO: 254826 - RNA, 86 nt, Homo sapiens
cggacgggcaagcccggccgggcaggggaccccgacccaggacggaccggaaggcccagaaccaagagcgcgcagaccaggcaccc

SEQ ID NO: 254827 - RNA, 73 nt, Homo sapiens
gggcagagccgcggggcaagacgaggcaagacgcgaagccaggcccaagacaccagcgagcccgaagacacca

SEQ ID NO: 254828 - RNA, 79 nt, Homo sapiens
cagagagcggacgggccaacccaaaaccagggcggcaaaacgagcgggccagcccacaccgggggcacgggccacagcg

SEQ ID NO: 254829 - RNA, 66 nt, Homo sapiens
ggcacccccgccagagggcagggacagcagcacgaaaaacccagcgcagagcggcaaccaagccgg

SEQ ID NO: 254830 - RNA, 73 nt, Homo sapiens
agaggaagcgcagaacggggggaagcaagaagcgaacccgaagacgaggaacagaagaagaggaaacgaagaa

SEQ ID NO: 254831 - RNA, 79 nt, Homo sapiens
aaaagacagagacagacaaggagggagagagagcggaacggagaagaaaccccaagccccagaaaaacagggggggaga

SEQ ID NO: 254832 - RNA, 72 nt, Homo sapiens
gcagaaaaggaaagaacaccacagaaacacccaaagagaagccccaaggcaagagggggaaaggacgccagc

SEQ ID NO: 254833 - RNA, 64 nt, Homo sapiens
cagaggcgagcccggggaggaagagggagcagaaacgggagaaaggaaagaagaaggcaacaag

SEQ ID NO: 254834 - RNA, 81 nt, Homo sapiens
aagggccggaggcggggacccaggacgcccccggggcagggaggaggggagccaggggacggagacgcccaagacacagac

SEQ ID NO: 254835 - RNA, 78 nt, Homo sapiens
gcccccggaagaaccgaaggacacacagagcagccaggcagaagggggaagcgccggaacaggagagagagagaggcc

SEQ ID NO: 254836 - RNA, 60 nt, Homo sapiens
agagggacgggcccgcggcgagcgagcccgaggaaacaacagacgggaagagagggggga

SEQ ID NO: 254837 - RNA, 70 nt, Homo sapiens
cggagaaagggacggcagcaggaagaccagggcaaagcaccccagagcaaaaaacggggagaacaaagaa

SEQ ID NO: 254838 - RNA, 66 nt, Homo sapiens
cggaagcggggggaccgcacgggcgacagaccgccgggaaggcccaggaaacaccacaggcggaag

SEQ ID NO: 254839 - RNA, 65 nt, Homo sapiens
caaaaagccgagaccacagggcagggagagaaaagacccaggaccgcaccaggggaaagggccgc

SEQ ID NO: 254840 - RNA, 49 nt, Homo sapiens
aaacagaaaacaagagaccacagaagggcacagagagcgcgaaggaccc

SEQ ID NO: 254841 - RNA, 65 nt, Homo sapiens
gaaaacaggccgcacaaaaccacccagacgaacacaaacacaggccggagggcacagaccggccg

SEQ ID NO: 254842 - RNA, 90 nt, Homo sapiens
cgggcggaggggccacgcaggaacccaccaaacaggaaccggagagagagacaaggggaccagcagacacagaggacgaagggaccgacg

SEQ ID NO: 254843 - RNA, 59 nt, Homo sapiens
aagaggaggacagcgcacacagcaagcacgagaccaacgccagagccggggaacagcgg

SEQ ID NO: 254844 - RNA, 75 nt, Homo sapiens
ccagaccggccagcagagccccaggcccggaggcggacccgcacacaggacccccagagagccaggaaggagacg

SEQ ID NO: 254845 - RNA, 79 nt, Homo sapiens
ggcgcggagagcaacgccgggacagcgcaagggaacgcagaggagcagggaccaccgaggcacagaggcaaagcaaggg

SEQ ID NO: 254846 - RNA, 64 nt, Homo sapiens
cgcccgcgcacccagggcacagcgcgggagccgcacgggccaagggccggggacacaagcaaca

SEQ ID NO: 254847 - RNA, 53 nt, Homo sapiens
gaaagaaagcaagaaaagggccaccgggagcaggagagggccagaagacaaag

SEQ ID NO: 254848 - RNA, 76 nt, Homo sapiens
gccggcgcagacagaggagacgagacggagcaccggagccaggaggcccgacccgacccggaccgccgcccggccc

SEQ ID NO: 254849 - RNA, 70 nt, Homo sapiens
ggaaaaagagcgagacagcacgggcggaaaaggaaagaagggagccccaccgcgggaaacaggagggcag

SEQ ID NO: 254850 - RNA, 56 nt, Homo sapiens
cgggaggcaacaacccccaagcagcaagaagaaagcccaagcgcaaaaaaaaggcc

SEQ ID NO: 254851 - RNA, 91 nt, Homo sapiens
ccacacccaccaacaacaccacaaaaccacagccaagcagggcgacagccaggaagccacagacccaaggaaagaaaccagaaacagaaaa

SEQ ID NO: 254852 - RNA, 68 nt, Homo sapiens
ccgcagcacgaccagcaggaacgaacacgacccgggccgcagccgacccggcggagccacagccaacc

SEQ ID NO: 254853 - RNA, 86 nt, Homo sapiens
gggacagcggcccccggagggggcagcccgggagaaccgcggcggccggagcggggcccgggcagagggaaagcagaggacggaac

SEQ ID NO: 254854 - RNA, 77 nt, Homo sapiens
cggagaccccaccgccggcgcgggaaacgggcgaagcgacgagccgcgaggagcaagcccgagaagcaagaccgccc

SEQ ID NO: 254855 - RNA, 83 nt, Homo sapiens
cacccgagacgcacacagcgggaacgaccgcaaacagcaaaggcaaccacgagaaaacggaaccgaaagcaagaggacaagaa

SEQ ID NO: 254856 - RNA, 86 nt, Homo sapiens
gagcggcggcggcggcagcagcggcagcggcaagcaccgacgcaacaaggcggaaagaccacaagaaacgacggcccggcaagaga

SEQ ID NO: 254857 - RNA, 80 nt, Homo sapiens
gccccccccccacccccgaccgggcggcgcggcggccagaggaaccccgagcacaagagggccagggaccaggggacgcc

SEQ ID NO: 254858 - RNA, 92 nt, Homo sapiens
gcgagcgacccagcccgcgagcgaggccaggcagagcagcccaccagggaggggagggggggaggcgcaccccgcgcccacccaccaccagc

SEQ ID NO: 254859 - RNA, 80 nt, Homo sapiens
gaacgccgcgcgaggacgcgggcagagaacagcagaccacagcagggagcgggcgcaccacaggaagcgcaggcccagcc

SEQ ID NO: 254860 - RNA, 73 nt, Homo sapiens
cggaaggggacccggggacgcggcgagacagcacaaggcggccgaccaagggaccagcgcagcacccgaacgc

SEQ ID NO: 254861 - RNA, 80 nt, Homo sapiens
ggcggaagacaggccacccagcggggagcacggcgagcagccaggccaggagaggaaggcacaggagagccaaaaggaga

SEQ ID NO: 254862 - RNA, 68 nt, Homo sapiens
ggacaagaaaaggcccgccgagaaaaacagaaaaggagagggacccccaccaaccaggaaaaggagcg

SEQ ID NO: 254863 - RNA, 71 nt, Homo sapiens
gaagagagaccgacacccaagacaagacagcgcaaggcaggcgcacggggcaggcgggcagcgagccaagg

SEQ ID NO: 254864 - RNA, 64 nt, Homo sapiens
cccccggcacgacaccgccccaacccacgagaggacagcccagagcggggacgggaaagagggc

SEQ ID NO: 254865 - RNA, 67 nt, Homo sapiens
ggaaacagaagcacgcgaccgaaagaagaaagcaccacggaggacggaccaaagggaggggaaacaa

SEQ ID NO: 254866 - RNA, 49 nt, Homo sapiens
acagccacagcggccaggaaccagagaagacacggggacccggcaaacc

SEQ ID NO: 254867 - RNA, 88 nt, Homo sapiens
aaaacgggagcgaagcagaggcaggaagaggcagaggaagaggaagaggaagaggacgggccgggcagaggaagagggggccaggcga

SEQ ID NO: 254868 - RNA, 72 nt, Homo sapiens
gccgccgggacccccaggacgacggaccggacacaccggacccacccaggaggcagaaacacgccgcgcgcc

SEQ ID NO: 254869 - RNA, 66 nt, Homo sapiens
aagaaggcccgcccccaccagacgagaccccccagcaagggaacgagggccccaaggacgaaaaaa

SEQ ID NO: 254870 - RNA, 81 nt, Homo sapiens
gcaagaacgccgccagaggaaccccgaggcagggccaggagggagggcacggaggaccagaggcggacacaccaccaccca

SEQ ID NO: 254871 - RNA, 83 nt, Homo sapiens
acaggaccgccgggggaccggaacagacaacccagaagccacccaacagagaagaccgaaggcaaggcccacagcccgaaggg

SEQ ID NO: 254872 - RNA, 68 nt, Homo sapiens
ccgcggaaggaaaaacaccccggaggggcgaaggcccgggaggagcggggacacgaggaccccccaaa

SEQ ID NO: 254873 - RNA, 74 nt, Homo sapiens
gcaaaaggaggagaggaggacagacaaaaggaggcaagaacaaggccccggagaggcacaccagaaaaaacagg

SEQ ID NO: 254874 - RNA, 72 nt, Homo sapiens
gagcccaggagaaaccggacgcgacgggcagaaacagccgcccagcgaacagcagcacggaccaacaacagg

SEQ ID NO: 254875 - RNA, 76 nt, Homo sapiens
gagcccacaagacgggaagaccacggcagcaagcaaagaaagggcgaaaaaaagaaaccagaaaggcagagcaggc

SEQ ID NO: 254876 - RNA, 75 nt, Homo sapiens
ccacccaggggggcgcgccgacacaggagaaggaaggcagaggaaccggagggaggcagaaaacacagggaaggg

SEQ ID NO: 254877 - RNA, 79 nt, Homo sapiens
ggaggaggcggagcgccacaaggaggacggagaggggaggaagacggagaaacagcaaggaaaccgaagaggcgggacc

SEQ ID NO: 254878 - RNA, 81 nt, Homo sapiens
caacggcgggggaccacgagagcccacagaccaaaagcgaagcacaccccagcaccacggagaccagcaacgacagacagc

SEQ ID NO: 254879 - RNA, 65 nt, Homo sapiens
aggaggaggcccaagaaaggccacgcacagaggagaaggcagagcccccccaggcagaagcccga

SEQ ID NO: 254880 - RNA, 64 nt, Homo sapiens
aggaagagcacccgcggagaccgcgggggccccagcccccgacaacaggccccaccccacacgg

SEQ ID NO: 254881 - RNA, 79 nt, Homo sapiens
aaaagaaggggcggaaggcccagcaaccaccaccagcaaagaacaaggagacacacggcagccaggccgaagggccaac

SEQ ID NO: 254882 - RNA, 47 nt, Homo sapiens
aaaagagacccacagccagcaacaccacccagaagcccacggcccaa

SEQ ID NO: 254883 - RNA, 87 nt, Homo sapiens
acccaccccacgcccccgcagcccagcccgcccgcagccgccgcggaccaggcaggagaaccgccggcccagcacacccccaggccc

SEQ ID NO: 254884 - RNA, 80 nt, Homo sapiens
gaggccggaaaccggcggcgccagccaccggagcaaccacaacccgcaagcaaaccaagcagcgcaagacccaaacgagc

SEQ ID NO: 254885 - RNA, 74 nt, Homo sapiens
gaggaaaccaacaaaacagccggggaaaccagcggcccggggcgaggaccggaccgcaaggggccaggagaacg

SEQ ID NO: 254886 - RNA, 55 nt, Homo sapiens
ggggcagagcaggggccggaagcaccaggacagccgggacagaccggagcgggga

SEQ ID NO: 254887 - RNA, 79 nt, Homo sapiens
cggccccgccgcccacccggacgccgacgaaagccagcgagccccagcccaggaaggggacaaaacccacgaagcaaag

SEQ ID NO: 254888 - RNA, 72 nt, Homo sapiens
cgcgacgcaggcgcacggagacccgccggcagacccaccaacaaccgaaaacaggggaacagaagcaggcgg

SEQ ID NO: 254889 - RNA, 75 nt, Homo sapiens
gacccccgcccggagagcagagcaacacggagggaagagaccgggagccggcaagagccgacggaaacacgcgcg

SEQ ID NO: 254890 - RNA, 74 nt, Homo sapiens
aggagggacagcagcaagagccccaaagccaccaggacagcccaaggcggaaaagcgaaggaagccacaagcac

SEQ ID NO: 254891 - RNA, 80 nt, Homo sapiens
agacaagcagaaaaagccagccgaaacaaaaaaacgagcaaaggcagaaaaaggaacggaacagcggaaggcaaggaagg

SEQ ID NO: 254892 - RNA, 49 nt, Homo sapiens
ccacagcagcaaacagggggcaaaaaacaccccccgcacaaaagacaga

SEQ ID NO: 254893 - RNA, 89 nt, Homo sapiens
ccgggcggccgcgcgagccggcggcccggagggggcggcggagacaccaggcgccgagaaggccagcagagaaacaggcaggagaggcc

SEQ ID NO: 254894 - RNA, 71 nt, Homo sapiens
acccacaggcgaaaccaaggccaggccagcgacggccggaagggaagcgggaccaccccccggaccaagca

SEQ ID NO: 254895 - RNA, 81 nt, Homo sapiens
gggagcgggcggccaaccagcggcgaagaggaaaaaaaacagaacaggaggggagagggcaggaaccaccgcccaaaggga

SEQ ID NO: 254896 - RNA, 75 nt, Homo sapiens
cgaaggagaagccgaaagaaaagaaccaaacggcgagaagacaccggcagacagggaaaccaagagcagagagag

SEQ ID NO: 254897 - RNA, 75 nt, Homo sapiens
ggaaaacgcggaaaaccgacacaacagccggagagaaaaagagaagaaccgaagacagagacaaggagagagaca

SEQ ID NO: 254898 - RNA, 86 nt, Homo sapiens
gacgggacagagcggcgggacagcccaagggccagcaccgcgcccaggcagagccagaccccacacgcacagacgccgggaccgga

SEQ ID NO: 254899 - RNA, 61 nt, Homo sapiens
ccacaacacaccacggcagacgcgacccagcgaggaagaaagagccaaaaccccggaggcg

SEQ ID NO: 254900 - RNA, 75 nt, Homo sapiens
aaagcaaggaagagcaagaacacgggccagcagcaggacacacaacccggcgaaaaacagccaagagaaaggagg

SEQ ID NO: 254901 - RNA, 73 nt, Homo sapiens
ggccagcaagacccgagcccagacagcccaaggcggaaaagcgaaggaagccacaagcacagcccacacaaac

SEQ ID NO: 254902 - RNA, 80 nt, Homo sapiens
aggacggacagagagccgggggagcaagaaagaaaagacaaggcgaaaccccagccacaccaaagaggccggagagggcc

SEQ ID NO: 254903 - RNA, 77 nt, Homo sapiens
cgaaggaggaagggaaccaacccacccggcgccgcggcccaaaagccaagcacacaggaggggacccccggcgaagc

SEQ ID NO: 254904 - RNA, 56 nt, Homo sapiens
cgaacagacgggagagacgagacagcaccgaagacaggcaggagaagggcaccggg

SEQ ID NO: 254905 - RNA, 74 nt, Homo sapiens
gacggggaggcgcggccaacggggccacaaggagggagccggaaacaaagaagaggagaaaaagccaaggaaag

SEQ ID NO: 254906 - RNA, 64 nt, Homo sapiens
ccagaagagcggagagacgaaagaggagaaacaccccagacaacccaagaaaaggcaacggacg

SEQ ID NO: 254907 - RNA, 106 nt, Homo sapiens
cacgagccagccgaccgggcagcggcgaggggacggagccggacaggagccgccgccgccaacagggggacaggagccaggccaagagaaagaaacacagaagcga

SEQ ID NO: 254908 - RNA, 78 nt, Homo sapiens
cacaccgcaggccacagccggagcagcccaaggcacaccggacagagaccggacagagaaggcgacggggccaagggg

SEQ ID NO: 254909 - RNA, 55 nt, Homo sapiens
aagcaagacccaggacaccccgaagccgagaaaggcacgggaggggagagagaac

SEQ ID NO: 254910 - RNA, 79 nt, Homo sapiens
ccacagcggagacccgaacacacggacacgcggcgccacgggccagacagggggccgggagcaggccgcgcacagcgag

SEQ ID NO: 254911 - RNA, 94 nt, Homo sapiens
ggagaaacaggcgccgcgggcccgcgcccggccggacccgggcccgaggcgcaagacaaggcccgcgggccaagacaaacaccacacaagaccc

SEQ ID NO: 254912 - RNA, 75 nt, Homo sapiens
gccgagaaaggaagggcgggaccaacagggagccagccaccaacaacaccagggacacaacagcaaggagcagaa

SEQ ID NO: 254913 - RNA, 64 nt, Homo sapiens
gacaccgccccccgccaacacaccccaagaagaaacggagagaggcaccagccgaagaccacaa

SEQ ID NO: 254914 - RNA, 73 nt, Homo sapiens
aaaacaaaacccaaggcagaacccagccccagcgccagggggcaagaacgcaaagcggaaggcggcacacaac

SEQ ID NO: 254915 - RNA, 83 nt, Homo sapiens
caggccgagaggcaaaaaagacagcccgcaccccgggccggcggaacccgggaccaggggaggcccgccgcacggggaggagg

SEQ ID NO: 254916 - RNA, 51 nt, Homo sapiens
aacacacgaagccagcccagccccccagacgcaccaaaagaaagagcgcca

SEQ ID NO: 254917 - RNA, 78 nt, Homo sapiens
cgaaccgccaaacccgcagcaccaacagcaccagaacgcacaccaccacggcaggaccaagggcagcaagccaccacg

SEQ ID NO: 254918 - RNA, 77 nt, Homo sapiens
ggacccacggcaggaggcaagaccccaaacaggagaaagcaaaacccaacccccagcagagaggagagcaaagccaa

SEQ ID NO: 254919 - RNA, 70 nt, Homo sapiens
acgcagggcgcccccgcgcgcacccgaggaccccaccaacaacggaaagccaagaaaggcagccaggccc

SEQ ID NO: 254920 - RNA, 60 nt, Homo sapiens
ggaagaaagagaaagacaaggcagccaaggaggcagcacggcaggagacgaggagaggac

SEQ ID NO: 254921 - RNA, 76 nt, Homo sapiens
agcgagccggagaagcaggggggccaggaggggagaggaggcaggcccgcggagaagacagaggagccagaccaag

SEQ ID NO: 254922 - RNA, 65 nt, Homo sapiens
agcagcgcacgccagacgaaggagcaagggcaacacccggagagaagagccgcaaccaaaccacg

SEQ ID NO: 254923 - RNA, 73 nt, Homo sapiens
cccggaggagcggagaaccggagcggccaacggcaggagagcgaagaagaaccagagaggcgaaaccgccaag

SEQ ID NO: 254924 - RNA, 42 nt, Homo sapiens
ggaaggacccaggccagaaagagcgacaagcccagagaacag

SEQ ID NO: 254925 - RNA, 40 nt, Homo sapiens
gccgggagacaccgccaccgccagaggagagcgggggcgg

SEQ ID NO: 254926 - RNA, 59 nt, Homo sapiens
caacacaggaaaacagagaaagaaggaaggagggccgaggcgcggcgcccacaagaaag

SEQ ID NO: 254927 - RNA, 87 nt, Homo sapiens
gcagaaaaagcggcagcgagaccgcaggggaaaggcgaggcccgacgggagggcaaacgcaggccgggaaggcagcaagccgggccg

SEQ ID NO: 254928 - RNA, 77 nt, Homo sapiens
ggacggagccccacagaccggaaagcggcccccccaacccagagcaaagagacgccggccggccccaaagacgggaa

SEQ ID NO: 254929 - RNA, 69 nt, Homo sapiens
cacccgccagacaagccgacgcccccagccggcccgaagccggaaacagagaaggcagaaacaaaaaag

SEQ ID NO: 254930 - RNA, 73 nt, Homo sapiens
cgacggagcggcacagccggagaagcggagaagacaagagcccgcgggcacgacccggaccgcgcagacgcgc

SEQ ID NO: 254931 - RNA, 71 nt, Homo sapiens
cggccgcggcacggcccggggccgggagcgcccgaggaacacgccgcaggccgcccagacacggggcaacg

SEQ ID NO: 254932 - RNA, 82 nt, Homo sapiens
gcgggagcccggccggagcgggcggagacgccgggcagccgaacggagggcgacggagggagggccaaaccaagccgaggcc

SEQ ID NO: 254933 - RNA, 76 nt, Homo sapiens
gcagcccgaggaagcggcgggcggccggagcgccaggagggcgcgcaagggcgcccgcccagaacccacgcggagg

SEQ ID NO: 254934 - RNA, 70 nt, Homo sapiens
aggccaccgagggaacccgaccggacccagccccagaagcggaaccacagaagaagaagaaaacaaaaac

SEQ ID NO: 254935 - RNA, 100 nt, Homo sapiens
ccgccagcacaagaggagacacaccccgacggcagccagacgggaagaagggagaggacagacgggcagagggggagacgcccggacgagcaggggggag

SEQ ID NO: 254936 - RNA, 71 nt, Homo sapiens
gccgcccaagagagcaagaccgggcccacgagggggaaaggaagaaaaggccacaagagaaccaaggaaaa

SEQ ID NO: 254937 - RNA, 75 nt, Homo sapiens
aaggcagcgaggggagagcgccccaagaaagacaccaaagaagaccgcaagaaggaaccaacgcaccacgggcca

SEQ ID NO: 254938 - RNA, 81 nt, Homo sapiens
acccaagagaaacacaacaccccaacaagagacaccagaagcagaaaagacccgacgacacagcccaaaagggaaccggac

SEQ ID NO: 254939 - RNA, 72 nt, Homo sapiens
cggaggaagccaagcagaggacgcgccaagaccgggcggaaacagggagggccacagcccccgcccgggaga

SEQ ID NO: 254940 - RNA, 77 nt, Homo sapiens
cacaggcaaaggaagcaccgcacacagccgagcagcaccaaaaagccaaggaaagcagccagagcagcagagcagca

SEQ ID NO: 254941 - RNA, 77 nt, Homo sapiens
caccggaagaaaagggaggagaagacagccggacaaagggaacagcgaagccaacagccaaaagaggaaagaaaaaa

SEQ ID NO: 254942 - RNA, 88 nt, Homo sapiens
ccacaacaacaagcccaggcccggaagcggggaacagcacgcaagaagccgggagagcgcacaaggccccgggaccaaggacacgcag

SEQ ID NO: 254943 - RNA, 74 nt, Homo sapiens
gccgggaggggagagccccgcaccccccccagaaacagggcgaagcgccccgaggaccggcccaccacgagcga

SEQ ID NO: 254944 - RNA, 84 nt, Homo sapiens
gaggggaggcccgccgccacagcggggcgccccgcgggaggagaaggcgccacccaagcccacaccacgagaagcaccaaagaa

SEQ ID NO: 254945 - RNA, 83 nt, Homo sapiens
gcgggaggcggggcggcggcgcccggggccaacagaccaggaaaagaacgccaacaccaaagacacaaaagaggggagcgacg

SEQ ID NO: 254946 - RNA, 80 nt, Homo sapiens
agacccggaaacaggggccacggagccacggccacggccgcaagccgacgaccccagcccgggggcggcgaggaggagcg

SEQ ID NO: 254947 - RNA, 67 nt, Homo sapiens
gaccacgccgggcaccccccggaagacgcgacgaggagagaccggaaagggagaaggaccaagaacc

SEQ ID NO: 254948 - RNA, 71 nt, Homo sapiens
gaccgggggaagggagaagaccaaagggaagagaaacgcaaccgacacgaagacgagagaagaagaaggga

SEQ ID NO: 254949 - RNA, 86 nt, Homo sapiens
caagacgggccgagaagcagcgcgaggcggcgccgaggaagagcagaaggaggcccaagggccagggacgaagcgggcaaggaaac

SEQ ID NO: 254950 - RNA, 67 nt, Homo sapiens
gcagggggggggggaagccgcagcggaaagcaggagcacaggcgccgcgcccggggagacagaaacg

SEQ ID NO: 254951 - RNA, 77 nt, Homo sapiens
ccaacagcagaaaacacggaaggccccagggaaaggaccgaggcaggaaagaggccagacgcagggaccggcaccga

SEQ ID NO: 254952 - RNA, 77 nt, Homo sapiens
cacggccacccccagcaacacccgagcccaccccaccaccccaaagccaccaggacccaacggcgacggcggaacca

SEQ ID NO: 254953 - RNA, 74 nt, Homo sapiens
cacacaggagagagcaagaccagccaggggaaacccggagggaaccaagaaccaacaaaggaacgagcagcaac

SEQ ID NO: 254954 - RNA, 81 nt, Homo sapiens
cggcaagcgagcagcgcgaagaaccgcagggcggagagcaccaccgccaggcaggagccagaggacgaaaccccgaccccc

SEQ ID NO: 254955 - RNA, 81 nt, Homo sapiens
cggaaccgagagccccgaggggggcgagcagacccaggcagccgcgcaaggcggccgcagagaacaacacccaagcaaacc

SEQ ID NO: 254956 - RNA, 89 nt, Homo sapiens
cgccagaacaggccccgcagcgaaaacccaacgagaccaaagaggcaaggcgaaccccccggccgccgggcacgggagccgaggagccg

SEQ ID NO: 254957 - RNA, 75 nt, Homo sapiens
gccccgccgccaaagccgggggaagcggggcgccggcgcaccggagaggccaggggaaggggaagcaggccaacc

SEQ ID NO: 254958 - RNA, 84 nt, Homo sapiens
cggacggaacaggcaaaagacccagaaggaccgggacgaggcacggcgccacaagcaggccgccagaagcgaacgcaggcagac

SEQ ID NO: 254959 - RNA, 65 nt, Homo sapiens
acccaaccaagggaccagggcgaaagccgcgcgacccaacaagcagcacaacacagacaggaggg

SEQ ID NO: 254960 - RNA, 83 nt, Homo sapiens
cccaggaccgagcaggaaccggagcaggggaccaaaagaacccagccaacccgcagagggaggggaggggcgagcggaggaga

SEQ ID NO: 254961 - RNA, 57 nt, Homo sapiens
accgacccggggcaacagcgagccgcgggaagggagcacggaaagaacccaacgcgg

SEQ ID NO: 254962 - RNA, 59 nt, Homo sapiens
cacaaggaaaacaccacaaggcaaagaaaccccaaagccagcaagaccacagcagcacg

SEQ ID NO: 254963 - RNA, 82 nt, Homo sapiens
accaaccaccccgggccggaacaaaggaaaaggggacgacccgagaggaagacgacagcaacaaaggacccaaagaaccagc

SEQ ID NO: 254964 - RNA, 53 nt, Homo sapiens
acaacgaacagaagcacaaccagagccggccccgagcgggccgcacgggggaa

SEQ ID NO: 254965 - RNA, 78 nt, Homo sapiens
cagaaaggccgaccaaaagccaacaaccccacaacaaaaggccacccaggagaagccagcgaggagccagaggaaagc

SEQ ID NO: 254966 - RNA, 52 nt, Homo sapiens
ccgaccccccggcgccgcgccggcggcggacaacgagccagcccgcaccaca

SEQ ID NO: 254967 - RNA, 77 nt, Homo sapiens
gcccgccagaacacaagggggaagccaagcgaagcacagcaaacaaggcaaggcagagccaccagaaacgacaccga

SEQ ID NO: 254968 - RNA, 96 nt, Homo sapiens
ccaaagccaaaccggaccagcacccccaacccccaggggcagaaggggaacaagcaagaaaagccccagaagggccgaaccgaaacccaagccccc

SEQ ID NO: 254969 - RNA, 72 nt, Homo sapiens
cggacgagcgcggcggaaggaggcccccggaggagggaagggcgcaaaagccaggcaacccccaaccgagcc

SEQ ID NO: 254970 - RNA, 82 nt, Homo sapiens
cgccgccgcgccgcgccgcgccgcaccccgagcgaccgcccgccgcccgcagccaaccgccgggacgacggcggggacgccg

SEQ ID NO: 254971 - RNA, 57 nt, Homo sapiens
caagcgaagccgaaaaagcgcccgagacgggcccgccgaaagaaaaggagcaacggg

SEQ ID NO: 254972 - RNA, 91 nt, Homo sapiens
ggccaggggacgacccaagcccaagagaggagaggaagcggcagagggaggcgcagacggggaagcggagccaacagccagggcccggagc

SEQ ID NO: 254973 - RNA, 54 nt, Homo sapiens
ccaggacgagccacaggagcccagcaaccggcaacagacaacacacacgcacaa

SEQ ID NO: 254974 - RNA, 110 nt, Homo sapiens
cccccaggaacagggcaaaggagagcacaaccacgcagggaagcccaggggcagcacacggacccgacaccggcgccagcgcaagaaacgagcagaagaggaacaagggg

SEQ ID NO: 254975 - RNA, 76 nt, Homo sapiens
gggcaacaacggaggcgagaacaaccagaagaccgccgacagcgaaggccggagaggggccccaggggagcccagg

SEQ ID NO: 254976 - RNA, 54 nt, Homo sapiens
agacaaaagagccacgacaacggcccgaagacccaaggaacacacggaccgaag

SEQ ID NO: 254977 - RNA, 76 nt, Homo sapiens
gacacccgggcggggcagagcagcccccagccagccgcgaggacccgcggggcccagccccaccagggcccagaag

SEQ ID NO: 254978 - RNA, 69 nt, Homo sapiens
ccgcccagggcccagaggacccaacaccagaagacacacagggggcgacgagaggccaggggccggaac

SEQ ID NO: 254979 - RNA, 56 nt, Homo sapiens
aaggaaaacgcggaaaaccgacacaacagacggcgaccaacaaagccacaaaagac

SEQ ID NO: 254980 - RNA, 86 nt, Homo sapiens
cccgagccagcgagccagcgagccgccgacccgccgagcaaaaggacacccggcacaccacaaaggccgcccccaccagcggggcg

SEQ ID NO: 254981 - RNA, 65 nt, Homo sapiens
gccccccaggcaacagacaggagggacaacagaccaccccgggcaacccagggggcaggacgacc

SEQ ID NO: 254982 - RNA, 64 nt, Homo sapiens
cgggaggggcgccccgacgccaagaagggaaagggcgaacccacgccacagagaaggaaaagac

SEQ ID NO: 254983 - RNA, 80 nt, Homo sapiens
cagaggaccaggcaccaccggccccggaaggccggggccgggcggccgaagggcacagccacccggggccccgagaaacc

SEQ ID NO: 254984 - RNA, 76 nt, Homo sapiens
aaagagacagacggacaacagcccaacaacacccagcgcgcggccgcaagaaaaggacagacgcaacacaggaaac

SEQ ID NO: 254985 - RNA, 82 nt, Homo sapiens
ccaggaggggcaacaaaccaccccaacacccagggagccgggaaagcagcaaagggggggggcggccaggccgcaggccagg

SEQ ID NO: 254986 - RNA, 78 nt, Homo sapiens
aaaccccccaggggaaaaagcagcaagggcaacaaagagaaagaacaggagcggcggagagacagcagaggacaaacg

SEQ ID NO: 254987 - RNA, 74 nt, Homo sapiens
gcaggaaacaagaaacaccaacacaaaaaaaaccaacagccccccaggaagccggcgagcaaggggaagcccag

SEQ ID NO: 254988 - RNA, 53 nt, Homo sapiens
gcgaccgggagcggaccccggggcaccagaagcacagaagcaagaaaaaacca

SEQ ID NO: 254989 - RNA, 82 nt, Homo sapiens
ccgagcccagccgaaggagaagggggccccacgacggcaggcgcacggaacagcgaggccagcaggagacggagccacggag

SEQ ID NO: 254990 - RNA, 69 nt, Homo sapiens
gagggacgcgggaggcagaggaccgggagcgcacccccgccggggacgacagcgcacgaccaggcaaga

SEQ ID NO: 254991 - RNA, 78 nt, Homo sapiens
cgacacggcgaaccagggcaggggacaggcaaaacgcgaacaacccacagaagcccaacagaaggaagaaaccaaacg

SEQ ID NO: 254992 - RNA, 76 nt, Homo sapiens
cccccaaaggggacgggaacgagaaaagggccagcggaggagacaacacgggaccgggcgggcggccgagccggga

SEQ ID NO: 254993 - RNA, 71 nt, Homo sapiens
ccgcgagacaagccaccgaaaggccgcgccagcaagggagccgcagaagcacacacgcacacacgacgcga

SEQ ID NO: 254994 - RNA, 79 nt, Homo sapiens
gagaaaccagcgcgccaagcaacaaacccagccccgaaagagacacgcaaggcaccaggaaaaagacccgagaagcgca

SEQ ID NO: 254995 - RNA, 113 nt, Homo sapiens
aacagggccgggacagggagcaccggaaagaggacgaagcagaaagcaaggaaacgagcagaagccccaggcagaagaacaagggcgacagcggggaaggggaacgaaaacgg

SEQ ID NO: 254996 - RNA, 62 nt, Homo sapiens
agagccccccgggaaacgagaccagccggggaaaacgacaacgccaccacgagaggacacaa

SEQ ID NO: 254997 - RNA, 68 nt, Homo sapiens
acccaaaaaacaacaaccggacacagagacaccaccccacaacaccgagcaaagaaaagaagagaaga

SEQ ID NO: 254998 - RNA, 60 nt, Homo sapiens
ccggaggcgcagcgccaagagaagcggagaagaagcaggcgccccccaccagccacagac

SEQ ID NO: 254999 - RNA, 68 nt, Homo sapiens
gaaccccgcccaagagcaggacaaggaacaggcagggccaggaacaaccgaaaccacagaaacaaccg

SEQ ID NO: 255000 - RNA, 81 nt, Homo sapiens
cgcggcagcaccgggcagccccgcacgccggcgcgcccgagcccgcggggcagcaccgccgggcacccagggccagcggcc

SEQ ID NO: 255001 - RNA, 70 nt, Homo sapiens
aagccggaggagaagcaagaaggcccggacacagcaaaccgggccacagaaggggaggcccgaacacaga

SEQ ID NO: 255002 - RNA, 87 nt, Homo sapiens
ccccgccgcaccacgcaccaggcggcaaaggaggagggagccggcaggagcgaggcagcggggcgcaggcgacaacgaggcaggacg

SEQ ID NO: 255003 - RNA, 58 nt, Homo sapiens
ggcggcgccgccacccccccccagcaggggccagaagagaccaagaggaccccagacc

SEQ ID NO: 255004 - RNA, 75 nt, Homo sapiens
gccgcagaccagaccgggaggagcagccgcgcgccgagaagcacccgcgacccagaaggacaaaccggcgaccac

SEQ ID NO: 255005 - RNA, 79 nt, Homo sapiens
ccaaagggaaagaggaacaaggaggccgacccgaacgccacaaggaaaaggaggaaaacccccggaaagggagaagccc

SEQ ID NO: 255006 - RNA, 120 nt, Homo sapiens
aacaggaagcaaaacggagaaaaagagaggaacgaagaagcagccccccaagaagggaaaaggacagcacaggagcccccaaggagagcggccagagaacaacaggagaaaccaccccca

SEQ ID NO: 255007 - RNA, 82 nt, Homo sapiens
cacgcaaaacggccgcccaaggccgcgcgagaagcggaccaaacgcacccaacccggcagccacgcccgcagccaagcccac

SEQ ID NO: 255008 - RNA, 69 nt, Homo sapiens
gccaacaagggcagagaaaaacgcaacaacgagcgacaaagcaaaaaaagaagcaaacaccgagaagga

SEQ ID NO: 255009 - RNA, 36 nt, Homo sapiens
cgggcgggagcaaccgaagcaaaaaaagaagcgaga

SEQ ID NO: 255010 - RNA, 72 nt, Homo sapiens
aggccacgaggcgcacaccgccagcccaagaaaaaggcgccggagacccaggcccaaggaaaaaagagaaaa

SEQ ID NO: 255011 - RNA, 81 nt, Homo sapiens
agagcacccggagcgcaaaggaaccaggccaaagacaagcaggaccaaagcaggaaggagagaaaaagaagcagggaacga

SEQ ID NO: 255012 - RNA, 81 nt, Homo sapiens
ggaaaagaagccagaccgagcaaaaaagacggggaacaacaggcaaagcaaaaagaagaacaagcaacccacgcagcccgg

SEQ ID NO: 255013 - RNA, 80 nt, Homo sapiens
ggaggaggaggcggaggggcgcggaggcgaccgccaggcgcccaaacccggaccagaaaacgacagaagcacgacaacaa

SEQ ID NO: 255014 - RNA, 80 nt, Homo sapiens
ccggcccccgccaaccgaccggccaacgacgccccaaggcgccaaggaggggacccccagggcaccggcacggaccaccc

SEQ ID NO: 255015 - RNA, 79 nt, Homo sapiens
gcgcccagagagagcggggccggaaggagcggcggaaagaccacagcaagaccacgcccccagccgggggaccaggccg

SEQ ID NO: 255016 - RNA, 79 nt, Homo sapiens
agccgccacggagcccgacgagcgcggcaagacaccaacacagacgggacccaaggccagccagccccaggcaccagcg

SEQ ID NO: 255017 - RNA, 83 nt, Homo sapiens
gagacagaaaaaaccaggaacaacaccaaccagaaggggaccggaccagagagaacacaggggccaaaggggcggaccaagcc

SEQ ID NO: 255018 - RNA, 74 nt, Homo sapiens
aacaagaacacacgagacgcaaaacgaagaagcaaggccgacaacacgaggagaccaccaaacccccaccaaca

SEQ ID NO: 255019 - RNA, 85 nt, Homo sapiens
accaaggagcggaccccgcaccgccgcggaaagggcagcgaggcacaggccccaccgcgaggcgagccaccccagggaacccggc

SEQ ID NO: 255020 - RNA, 53 nt, Homo sapiens
accggagagcacccaacagggcgaccacacgccgaggcgccagacgcagaaaa

SEQ ID NO: 255021 - RNA, 84 nt, Homo sapiens
acacagcaacacagcgccaccgcggcacccagggcccaaggcacgacacagcagggcggccagccagcagagggggaccaacgc

SEQ ID NO: 255022 - RNA, 80 nt, Homo sapiens
cggggcgcgggggccgcgcgaagacaggaccagggcacggaggcgaagggagggccgccccaaccgacgcaccagccgga

SEQ ID NO: 255023 - RNA, 76 nt, Homo sapiens
cccgaagcgcaggcggacggagcccggaagaccacgacacccagcgacgaagaaaaggggggacaggcacacaggc

SEQ ID NO: 255024 - RNA, 67 nt, Homo sapiens
acaccagggcccacacaacgcaaggaaagaggcacacagagaaaaaaagggaacaaaacacagcaag

SEQ ID NO: 255025 - RNA, 76 nt, Homo sapiens
gaaacagaagaaggccagcgaggaagaacccaaacagcagcaccacagccccagagcaaggaaacaccaggagacc

SEQ ID NO: 255026 - RNA, 80 nt, Homo sapiens
ggcacgcaggacagaaagaccaacagaaacgaggacaaggaccgccgggcaagacccaagggagggggaaagaacgggag

SEQ ID NO: 255027 - RNA, 83 nt, Homo sapiens
gagagcgcgaggcgggggccggccccggaggcggcggggcggcagagagcggggcggcggcagggaaacacaaagaagacacc

SEQ ID NO: 255028 - RNA, 57 nt, Homo sapiens
gggaggccaagggaaggaggcacaggggcaacgaggagaaggcacagacacagggga

SEQ ID NO: 255029 - RNA, 79 nt, Homo sapiens
ggacggcaaacggagccaggcacaagaaaacacccaccaaggcccggaggccccacaacaggggcagacacccaaagga

SEQ ID NO: 255030 - RNA, 75 nt, Homo sapiens
ggcccccggaaaaccaaccagaagacgaacaaacagcaagaaagaccacaagaccagaccgacaagacggaaacc

SEQ ID NO: 255031 - RNA, 79 nt, Homo sapiens
accaagaaccagaaagagagcacaagcccaggaacggggagaaacgccagacgccccgaccaagaagaaacgagaagca

SEQ ID NO: 255032 - RNA, 72 nt, Homo sapiens
cgcccaaggcccccaacgcacagagccccaggaagaagccaagccaaaggcccaccaacgagggagaccgac

SEQ ID NO: 255033 - RNA, 75 nt, Homo sapiens
cgcccacacaccaaggagagggcacgcgaccccaaggagcgcccaagcccggcgggcggccgcccccagcccccg

SEQ ID NO: 255034 - RNA, 76 nt, Homo sapiens
aagcccgcagggacgaggccccaaggggaaaggagacaggaaccaggaccagcagaccccaccaacacgcgaggac

SEQ ID NO: 255035 - RNA, 78 nt, Homo sapiens
gccgacaaggagggaagcggccccagcaccccagcgcgcagggccgccaggggcgccggagggagcaaaggacggcac

SEQ ID NO: 255036 - RNA, 72 nt, Homo sapiens
ccagagggagaggccaggaagcggccagagaaaggaggcaggccggaagaaacgcggaccgcggagggccgg

SEQ ID NO: 255037 - RNA, 92 nt, Homo sapiens
gcccccagagaccaaagcccgagacagaagccagcagcggccccgagcagaccccggcgcaggaacacaggacggccgaacacgacgcacac

SEQ ID NO: 255038 - RNA, 70 nt, Homo sapiens
ggcggacacccacccaaaacgggcccacagggcacagccacagccgcaagccaagagcagcagaaaagaa

SEQ ID NO: 255039 - RNA, 73 nt, Homo sapiens
aaaggcggaacggcgcgcgcgccgggacagcgaagcgcgcggccgagccggagaacggccgagcgaccaggag

SEQ ID NO: 255040 - RNA, 80 nt, Homo sapiens
gcaagcgagaaagcacgaggcacccccggaccagaacggcacggccacgggcgggcaggcaagccacgacagggccacgg

SEQ ID NO: 255041 - RNA, 76 nt, Homo sapiens
aaacggcgcagaagaacggcaaagacagagagggaacaggcacgccccacccgccagccgagcccccgacgcagca

SEQ ID NO: 255042 - RNA, 73 nt, Homo sapiens
cgggccgcggccgccccagaagggccaagggacgcacgggagaacagaggcgagagcggcagcagcaccagcc

SEQ ID NO: 255043 - RNA, 38 nt, Homo sapiens
gccagaggaggacagcacgacgacaagacagccaaacc

SEQ ID NO: 255044 - RNA, 76 nt, Homo sapiens
cccagcacgcacgccaagacgaggacaagggcaggcccccgcccccggcacgacaaggagccaggggccaggaaca

SEQ ID NO: 255045 - RNA, 77 nt, Homo sapiens
cgcaggcggggaacagccggaagggcggggggcgggccggaggggagacgggaggcagggggcaaggacgcagaaaa

SEQ ID NO: 255046 - RNA, 90 nt, Homo sapiens
aagcaaaaggaaggaggcaaaaagaagaacaaagaaggacggagaggaggcgagcgagcagacgaggcggagaagaagccgacgaggccc

SEQ ID NO: 255047 - RNA, 79 nt, Homo sapiens
ccggacccaacggggcaacagaagaagaggggccccaaaggcagcgcggcaggaacacgcgcggacagaagcggccggg

SEQ ID NO: 255048 - RNA, 89 nt, Homo sapiens
cgcgcgggaccgcacaggccggagagagccgaggcaggaccccgggacacccggaagccaggaaagaaagcaaaccccacgagaacaaa

SEQ ID NO: 255049 - RNA, 64 nt, Homo sapiens
ggaagcacacaagggccgaagcagggcacaaaaccaaggccaagcaaggaacccaggagccccc

SEQ ID NO: 255050 - RNA, 72 nt, Homo sapiens
ccagaagagaccaacgccaccaaccaaccggaaggaagggaacacggacgacgagacacgaccaacacaggc

SEQ ID NO: 255051 - RNA, 55 nt, Homo sapiens
gccaaacaacggacaaagaccagggaagaggacagagagacgcaaaggaaggccc

SEQ ID NO: 255052 - RNA, 58 nt, Homo sapiens
ggacgccccagcacccccagcgggcagggcccccacgacccgccccagcccccagccc

SEQ ID NO: 255053 - RNA, 78 nt, Homo sapiens
cagcccaagagaccagcagggcgccacccgggaacaagcagagaaaaaagaggccggcgggaccaccgcccaccgggc

SEQ ID NO: 255054 - RNA, 89 nt, Homo sapiens
gagcgaaaagcagaagcagaaacacagaaaaagacgaagaagagagaacccgaagagcccaagcagccaagaaaaaggcaaaaaaaaag

SEQ ID NO: 255055 - RNA, 52 nt, Homo sapiens
cgcagggcgcccccggccgcacgcccaaagcggaaacgcggaagagaccggg

SEQ ID NO: 255056 - RNA, 84 nt, Homo sapiens
caccccgacacgccgcggcaaagggaagagaggacaagagggaaaagaagacccaccaacacccccacacgaacaccaaaacaa

SEQ ID NO: 255057 - RNA, 101 nt, Homo sapiens
gcaagacaaccgccgagaagcgccacaagaacagcgacaccgcccccgccaggagacgcggcaggcaagaacgcaccgcaggggccgcacaccaccacgag

SEQ ID NO: 255058 - RNA, 69 nt, Homo sapiens
cagaagagacaagcaacagaagaaagaagagcagagaaccagagcccacacacagaaggcggaagaaga

SEQ ID NO: 255059 - RNA, 51 nt, Homo sapiens
aggcacaacaggcccaacacgcagacggcaggcaccaaggaggccccggcc

SEQ ID NO: 255060 - RNA, 35 nt, Homo sapiens
gccggcggccccccgcgggggagcgcagcaggggc

SEQ ID NO: 255061 - RNA, 75 nt, Homo sapiens
aaaaagaaacaagcaagccgccaaaggagaaggaggagaccggaagagcgaccacgcccggcgaaaagaagccac

SEQ ID NO: 255062 - RNA, 56 nt, Homo sapiens
aaggaccagcaccagaaagacacgcagcggccgaggcaggggaagagagcggcccc

SEQ ID NO: 255063 - RNA, 70 nt, Homo sapiens
acgaaagcacaaacaaccgaaggaaacacaagagagaaaaagaccgcgagccgaagggccgaaggaagca

SEQ ID NO: 255064 - RNA, 55 nt, Homo sapiens
caacccaacggacacggaacaccagcagcacaaggaaaacgagagaaacgaaggc

SEQ ID NO: 255065 - RNA, 68 nt, Homo sapiens
ggcagacaaaagggccaaagaagggagaacagcgagcagaagaaaacagaaaaacccagacacccgcg

SEQ ID NO: 255066 - RNA, 74 nt, Homo sapiens
caggagcagagacaacacaggaagaacgcagagaacacccaccacagacagggccacgcgcccaggcggaggca

SEQ ID NO: 255067 - RNA, 59 nt, Homo sapiens
acgagcgggagaaggcgcgcgcaagcacgcgaggaggccgcaggaagccggggcaggcc

SEQ ID NO: 255068 - RNA, 74 nt, Homo sapiens
gagagcgcaggacaacggccagacggagggagagcgccggaaacagcagcaggcaacccgaaggacaacgagaa

SEQ ID NO: 255069 - RNA, 53 nt, Homo sapiens
aaaaggcagagaaacaaagagcgcagagacagaggcggcaccaggacgccgaa

SEQ ID NO: 255070 - RNA, 74 nt, Homo sapiens
acccggccagggcagcccagccgaaccgcgcgggcgaaccgaggccaggcaagagcgagcggcgcccagaagaa

SEQ ID NO: 255071 - RNA, 71 nt, Homo sapiens
agccgcacccgcgccaccgggcaggaagcagcagggcccagaggagacaggggaaccaggaggaggacagc

SEQ ID NO: 255072 - RNA, 76 nt, Homo sapiens
cggggagcgcgcgaagccggggcggagcacgcgagcagcacggggcaccgggcccagaggagcagcccggagcggg

SEQ ID NO: 255073 - RNA, 57 nt, Homo sapiens
ggcgagaagccgcgggcggaacgaaggcaggacccgaggagagagacgggaagcagc

SEQ ID NO: 255074 - RNA, 66 nt, Homo sapiens
cgacgaaccggggaacagaccaggggaaggcccgaaaggaaggacacgcaaccggaaggagggggc

SEQ ID NO: 255075 - RNA, 40 nt, Homo sapiens
agagggggacacccaaaggggaagcgaagggaagcacgaa

SEQ ID NO: 255076 - RNA, 74 nt, Homo sapiens
gcaggaacccagaagaccgcaccaggcgagggcgaccagcaacaacgagaggccacaaaagcgggaaaaaagga

SEQ ID NO: 255077 - RNA, 76 nt, Homo sapiens
aagcgcaaaaacaagacggggcgccccacagaggggcgacggccgcggggggcagacaaccacgcgcggcaagcca

SEQ ID NO: 255078 - RNA, 72 nt, Homo sapiens
aaaagaccagcaacaccacgccgccacacagcaaaacagggcagaaaagaacacggagcacgggcccaggcg

SEQ ID NO: 255079 - RNA, 81 nt, Homo sapiens
cggcgggacagcaaaaagacccaccaaggaagcagcggccacgccagcagcgcaccgggggggcaagcagaccccaggacc

SEQ ID NO: 255080 - RNA, 78 nt, Homo sapiens
ccgacccagagagaccaggcggcggaagagagccgggcccgccgggcgaagccgaacaggccccgagccccggcccca

SEQ ID NO: 255081 - RNA, 77 nt, Homo sapiens
gaagggaaggcacgaaaagcacggagaggcaccgcgggcaacaggcccacagaggagcggccagccgcccaggcgga

SEQ ID NO: 255082 - RNA, 71 nt, Homo sapiens
cccccgccagccgacacaaccagaaagacaacaggcacaaagagagaaggaacacccacagggcagacaga

SEQ ID NO: 255083 - RNA, 73 nt, Homo sapiens
ggcccgggaccacaggccccggcccagacaacggggcggcacacaaggagcgaagggcagggagaacgccagg

SEQ ID NO: 255084 - RNA, 83 nt, Homo sapiens
cccccgccaaggggcccccaaaggccccccagcaggcacagccggggccagaaggccccccaggcaaagagagacaacgacca

SEQ ID NO: 255085 - RNA, 74 nt, Homo sapiens
acgggcgcgagcgccgcaccacacacgggacggaggcacaagccagggcaggaagccgacaaacaccacagaga

SEQ ID NO: 255086 - RNA, 40 nt, Homo sapiens
cccccgagggcgggacacagaggaacagcgcccccgggcc

SEQ ID NO: 255087 - RNA, 77 nt, Homo sapiens
cagcccgaaacccgacaggaaggaaggaaccaagcacccagcggaggggcaggacgcacagcccgacgggaagcagc

SEQ ID NO: 255088 - RNA, 36 nt, Homo sapiens
gcaagggaggagagaaacaggagaaggaccaagaac

SEQ ID NO: 255089 - RNA, 79 nt, Homo sapiens
gaccgacggggcgcgcgcggggacaaagaggggggaggcaaagaaagaagcccggaaacgggcggaagccagccaaaag

SEQ ID NO: 255090 - RNA, 78 nt, Homo sapiens
aaagccgggccgggacgccagaggaggcagcgggagagggcgcgccccagaggaagccgacagcaggaagcaccagac

SEQ ID NO: 255091 - RNA, 74 nt, Homo sapiens
aagccaagcaaccccgcgcgacccaaagcgcggaaagggcggagccacggcccaggaagaagagagggcgaagg

SEQ ID NO: 255092 - RNA, 49 nt, Homo sapiens
acgaccagccaacaacgggaccaggaaggagggccccggagcagccaca

SEQ ID NO: 255093 - RNA, 115 nt, Homo sapiens
gggacgaagggcccggcaaagacggccaagaggacacgacggcgaccggggggacagcggagaggaaggaacgaagcgcccaccccgagcccacccccacccgaagagccgccgg

SEQ ID NO: 255094 - RNA, 48 nt, Homo sapiens
agcggacgccccagcacccccagcgggcagaacccagagacgggcccg

SEQ ID NO: 255095 - RNA, 74 nt, Homo sapiens
ccagagaaggagacccaggacaggagccccagcagacggcacagccccaggggcgggccacgcgcggggcggcg

SEQ ID NO: 255096 - RNA, 71 nt, Homo sapiens
acaggacggcccaaaaccagccgacaaagagggggcccaagaagccaaggagggaccccaagaaagcaagc

SEQ ID NO: 255097 - RNA, 85 nt, Homo sapiens
caaggacagcagagaaagaagaacacaacacacaggccacgagaagcaaaggaggaaggaggcgaacggggcgcggagcacgaag

SEQ ID NO: 255098 - RNA, 59 nt, Homo sapiens
cggaggaaggaacgggcacagcaggggccgcaaggccaggcgcgcagaggcacccaacg

SEQ ID NO: 255099 - RNA, 48 nt, Homo sapiens
ggcccagcggaggggcgaccaccggacccgaaggcaccaagcaccgcc

SEQ ID NO: 255100 - RNA, 77 nt, Homo sapiens
ggggccgagagcgacgggggaagcaccgcacccggagccgggggggcggccaaccagaggaagagacagccgaggac

SEQ ID NO: 255101 - RNA, 52 nt, Homo sapiens
aacccggaagaggaccccggcccgcgcagagacaagagaacagaaccagaaa

SEQ ID NO: 255102 - RNA, 65 nt, Homo sapiens
ccggcccggccacccgggagagccgcggcgcaagaaagaagcaagggagacccaagcagaacgac

SEQ ID NO: 255103 - RNA, 82 nt, Homo sapiens
ggccgagaggaagacgagccgggaggaacggcccggaaacaggaggacggagaagcccaccacgcaacgggacggcgcggcg

SEQ ID NO: 255104 - RNA, 88 nt, Homo sapiens
gaaacggcccagcggaacgacaccaaagagcaacgaaacagaccacacagacacagaaggggaacgggaacagccagggccccaaagc

SEQ ID NO: 255105 - RNA, 68 nt, Homo sapiens
acaccccaacagaagcccagccgacggcccacaagggcaagggaagcagagagcaaccaagcaccacc

SEQ ID NO: 255106 - RNA, 67 nt, Homo sapiens
gaggaaccagaagccagcaggaaaggcgaagcgaaagagaggaacaggacggccaggcccagaacga

SEQ ID NO: 255107 - RNA, 69 nt, Homo sapiens
cacccagaacaacaaagagggcaggcgccgggaggggccgggggccagcccggacccagccggaaaagg

SEQ ID NO: 255108 - RNA, 77 nt, Homo sapiens
cggaacaccagcaagaagggaaccccgccaagcgcacagcaacaggaaaggagagggcaacgaacgacagccaggaa

SEQ ID NO: 255109 - RNA, 74 nt, Homo sapiens
gggcaggcagaagaaggggaacccgcgcccaccagacggcgcggacggacagaaggaacccccaccccgcgacc

SEQ ID NO: 255110 - RNA, 71 nt, Homo sapiens
agaccaggacggacaagcacagccggaagaggcggccccaggggggaccaacaagggagaaccaacagaac

SEQ ID NO: 255111 - RNA, 64 nt, Homo sapiens
aacaaagaccagccagacgcgaagagggcccagagaagcgacagcaaagcacgggaccagcaca

SEQ ID NO: 255112 - RNA, 72 nt, Homo sapiens
ccagaacggccacagaacacagcccccagggcaggaaaagagggaaagccgccccccccaggcgcggcccca

SEQ ID NO: 255113 - RNA, 70 nt, Homo sapiens
ggacagggcaaccaggcgggaccgcggccccgacaccagcaccagacacacagggaggaccaccaggaac

SEQ ID NO: 255114 - RNA, 71 nt, Homo sapiens
agacgcagggcgcccccggacaggcgaagaaacagagaccacagagcgggaaaagggaacccacaggcagg

SEQ ID NO: 255115 - RNA, 46 nt, Homo sapiens
agaaccaagggaaaacaaagggaagcccaaggacgcgggggaccaa

SEQ ID NO: 255116 - RNA, 53 nt, Homo sapiens
cgaagcccagcgggccggacggggcggggggaacgccacaagaaggagagacg

SEQ ID NO: 255117 - RNA, 78 nt, Homo sapiens
cccggagcgccgcgggccgccgcggcgcaggaaccggcggaccgaggcggcagcgaggaagcacgaccaagccgagga

SEQ ID NO: 255118 - RNA, 74 nt, Homo sapiens
ggaggcagcgcgaccccgcacgaaagccgagccgggccagcccacacaccgcccccccggagacacggaagacc

SEQ ID NO: 255119 - RNA, 74 nt, Homo sapiens
ccgagaaccgcaggagccagaggcacccccagcaggacagcacacccaaccagacacaccaccccacaacagga

SEQ ID NO: 255120 - RNA, 76 nt, Homo sapiens
gacgaaagcacagcaacgacgggacacgggcccacagggaagaaaacgccagagaagcagagcagcccggagcgag

SEQ ID NO: 255121 - RNA, 73 nt, Homo sapiens
ccgaccacccaaccacgcgcccagaccaaggcccaggaggcaagagcgagaagagcgcaagacagaaagcgaa

SEQ ID NO: 255122 - RNA, 77 nt, Homo sapiens
gcgacagaggagggaggaaaacaaccgagggcagagcacccacgaggcggcgacggaaagccccccacgggaggcca

SEQ ID NO: 255123 - RNA, 68 nt, Homo sapiens
agaggcggaacaggcaccaagccggcggggcggaggccggaagagcgggagcgggagccaggcagaag

SEQ ID NO: 255124 - RNA, 75 nt, Homo sapiens
gcgggagacgaagggccggaacgcacccgaacgcaagaccaccgagacacaaagggaaaggagaagggaaacaaa

SEQ ID NO: 255125 - RNA, 81 nt, Homo sapiens
acccggggggagaccggccggagccccagggccgaggacagcccagagcaagcacacggaggcccgggagccagaccggga

SEQ ID NO: 255126 - RNA, 71 nt, Homo sapiens
ggcgggaagagcacccagaggagcacccacgggagaccggggggcaagaaaaggaagaagaagcacaccac

SEQ ID NO: 255127 - RNA, 83 nt, Homo sapiens
cccacaggaggcaaccacacagagggcagagcggcgggaaaccaccaacaacacccccaaaccaaaacagccggaagcgggca

SEQ ID NO: 255128 - RNA, 55 nt, Homo sapiens
caacaccaaaaacaaaacgaaccaggacggcaacaaaagcagacacacaccaaac

SEQ ID NO: 255129 - RNA, 94 nt, Homo sapiens
cgggagaaaaaggaaaacgcggaaaaccgacacaacagggggagcagggcccggcggcagaaccgcccaaacacgggaccaaacaacaagcggc

SEQ ID NO: 255130 - RNA, 75 nt, Homo sapiens
gaaccgcgggaccgacacacaagcgacaggacggcagaccggggggaggcacaggagagcagggagaccccacgg

SEQ ID NO: 255131 - RNA, 72 nt, Homo sapiens
aggccggaggagaacgagaggaaagaagcccacacgggcaccacagaacagccgaagcaggccaccagccga

SEQ ID NO: 255132 - RNA, 71 nt, Homo sapiens
cccgcccacccagggccggaaaagccaacgccggcgaagaaaaggaagaggcgccacaccaagaccgaggc

SEQ ID NO: 255133 - RNA, 54 nt, Homo sapiens
gaaggcccacaggacaggagagaaagacggaccgcccccaaaccccccgaaccg

SEQ ID NO: 255134 - RNA, 75 nt, Homo sapiens
ccggcccgcagcccccgccggccgcccaacaccgaacaccgcagcgcacgggaaagcgccgacgacagacggagc

SEQ ID NO: 255135 - RNA, 73 nt, Homo sapiens
aacgcaaccagaagcagcacccggaagagcacagcggcgagcaggaaaacccagaggaaccaaagcccccagg

SEQ ID NO: 255136 - RNA, 68 nt, Homo sapiens
gcccacccagggccggaaaagccaacgccggcgaagggcagcgacacccagacccaccggaccaggcc

SEQ ID NO: 255137 - RNA, 74 nt, Homo sapiens
aacggcgaccgaggaacgcaaacgcgaaaagggcgcaccaacaccaccagaaagggccgccgccacaacagagc

SEQ ID NO: 255138 - RNA, 82 nt, Homo sapiens
cccagacgccgaggccccagaacaagcggagccaccggcaccacggaggaccgcgccaacaggacgaggagaccgaccagga

SEQ ID NO: 255139 - RNA, 72 nt, Homo sapiens
agccggagagcgcgagacaagagaccagaagaggccgcgagcagcaggggcgaccacgaccgaagagccaga

SEQ ID NO: 255140 - RNA, 72 nt, Homo sapiens
acaagagcaggaaacaaggagccaaacaaagaccacagcagaacaccgcgcacccacgcaacggaccgagga

SEQ ID NO: 255141 - RNA, 80 nt, Homo sapiens
aacgcagccgccggccgaccaccggaacggacagcccccccagagaggacagaccccaggaccaagacccgcaaccagga

SEQ ID NO: 255142 - RNA, 70 nt, Homo sapiens
agagaaaaccccgcaagccaacgcaccaccaggaaacagaacgacagcccgcaccgacgccggcggccag

SEQ ID NO: 255143 - RNA, 84 nt, Homo sapiens
cggagccgaggcgagcgccgcgcgcaccacggagaaccggggcaagagacggcagacaaacacagccgagagaaggcaggcgac

SEQ ID NO: 255144 - RNA, 82 nt, Homo sapiens
cggcccagcagcgcagccgcagccgggcggcagggccccgagccggcccgggcgagaaaggacgagaccgaagagaaggaag

SEQ ID NO: 255145 - RNA, 63 nt, Homo sapiens
agccccggcggagaccacgcaaggccacaggcggcgcccagcggccacacgccccaagcgcca

SEQ ID NO: 255146 - RNA, 69 nt, Homo sapiens
ggggcgaagccaagacgcgcaaaaggcagagaagcagaagcggcccaccagagcacacaggggacccag

SEQ ID NO: 255147 - RNA, 78 nt, Homo sapiens
gcaccgcggacagagcagacagaacagacaaggggacacgggcagaagcacggaccaaagaaaaaaccgagaagaaag

SEQ ID NO: 255148 - RNA, 80 nt, Homo sapiens
gggaggcccggccgccccggagggagacgcgcgccgaggagaacccagcggcgaaggagccggaaggggcaccagcagcc

SEQ ID NO: 255149 - RNA, 69 nt, Homo sapiens
acccgcccagaaaccaacagaagaaggggcggcaaggagccaacagaagaccagacagggccacgcacc

SEQ ID NO: 255150 - RNA, 81 nt, Homo sapiens
gccgagagcgagaaacaaagccacccagccaagaagccaagagagagggacccaacaggaagagaggcccagaagaggagg

SEQ ID NO: 255151 - RNA, 80 nt, Homo sapiens
agcccagaagccaggcgagccaaaccaagccaagagaaggacgaaccagaagcaaaccgcagccagaccgaccccgccaa

SEQ ID NO: 255152 - RNA, 75 nt, Homo sapiens
aaggccacagagagccagccccaaccgaacccagacgcagaacgccggggggggcacagagccccggaagacagc

SEQ ID NO: 255153 - RNA, 55 nt, Homo sapiens
gcccggcccggccccgacacggagaacccggaagaagaggaagaggaaggcaaag

SEQ ID NO: 255154 - RNA, 100 nt, Homo sapiens
gggagcccgcgcccgccgcgggagagaggacccccccccccccccaaggacccaaagacaggaccacgcaccagcagagaaggaaagcaaaccgaagcag

SEQ ID NO: 255155 - RNA, 79 nt, Homo sapiens
gacgaccgacaggggggaaagacacgagaggcgagggacgacagagcaagcggcagagggcaagcgggaaaaagaccag

SEQ ID NO: 255156 - RNA, 81 nt, Homo sapiens
ggcagccgcgaggaggcgcgggagggcgagaacgaccccgagacgaggccaacggcgggaggcggggaccagaagacaccg

SEQ ID NO: 255157 - RNA, 75 nt, Homo sapiens
cacacaaacccgggacgggccgagagcccggagagaggaggccgcagccgggccagcgccccacggcggccaacg

SEQ ID NO: 255158 - RNA, 84 nt, Homo sapiens
ccaccccggcacccaagccgcccccgccgccccggcccggcgcgcaggggaggcggaggcagagcagacccgcacgcagcccaa

SEQ ID NO: 255159 - RNA, 50 nt, Homo sapiens
gagaaggaccaagaaccagggcaagaccaagagcagccaacaaacagaca

SEQ ID NO: 255160 - RNA, 76 nt, Homo sapiens
aacacagacgggggcgagcggacccgcagccccaaacgccgcccaagagagagaagagaggcgcgagggcagggaa

SEQ ID NO: 255161 - RNA, 83 nt, Homo sapiens
ggagagcacaaccacgcagggaagcccaggggcagccagcaagcgcccggaggaccgggacccgggccgacagcagcagaagg

SEQ ID NO: 255162 - RNA, 81 nt, Homo sapiens
gaagggcgcgggagggggccggcgcccgcggcaggcggcccaaaggcgaaacacagaaggagacaaccacagggccccagg

SEQ ID NO: 255163 - RNA, 40 nt, Homo sapiens
gccgaacgccacaccacagaagggagcgagcacaaacgac

SEQ ID NO: 255164 - RNA, 75 nt, Homo sapiens
accagccacagaaaacgaacaaaagcgccgggaagcaagaggcaaagagaacggggagcggagcgcaagaagaag

SEQ ID NO: 255165 - RNA, 88 nt, Homo sapiens
cccgaggaggaagacgaacgaaacacgaaagggcaggcaggagcgggaggaggcggcagcggcggcggcagaaacagcagcggcggcg

SEQ ID NO: 255166 - RNA, 75 nt, Homo sapiens
cccaaccaccaccgcggaccccccacagagccaccgcccgcacgcacaggcccgggaagggccgacagagacaag

SEQ ID NO: 255167 - RNA, 41 nt, Homo sapiens
gaagcgggcggcgcgggggagagaagccgggacacgcccgc

SEQ ID NO: 255168 - RNA, 80 nt, Homo sapiens
cggcccggggcggcgccgaggggaggaggcggaaaaaggcagacccggcaccacagggaaaacggggcaagcccagaaac

SEQ ID NO: 255169 - RNA, 69 nt, Homo sapiens
cccgcgaagacaaaaaacccaagaacccaaggcccaccggaccgggccacagaggcagaaaccagcagg

SEQ ID NO: 255170 - RNA, 58 nt, Homo sapiens
ccgagggccacccccggcccgccccgcgccccgcagggccagggggcggaacaggaac

SEQ ID NO: 255171 - RNA, 80 nt, Homo sapiens
ggcgcaacacacaaggaagggcaggagaccccgaaaccggagcgagacccgaaggagagaccgcacgcagggccacagca

SEQ ID NO: 255172 - RNA, 78 nt, Homo sapiens
gaaaaaagcagagagggcagaaaaggaacagagggccggggcaagggccgggccaccccagacggcaacaccggcacg

SEQ ID NO: 255173 - RNA, 59 nt, Homo sapiens
gacaagagcggaacgaaaacggaaaacccagaagaagaaaagcggcggggggggcgggc

SEQ ID NO: 255174 - RNA, 48 nt, Homo sapiens
acagagaggagggagaacaagcaacggcgggcaaggaggaaaaagacg

SEQ ID NO: 255175 - RNA, 37 nt, Homo sapiens
gacggaacggaaaaacaaccccgaacaggcccaaggg

SEQ ID NO: 255176 - RNA, 63 nt, Homo sapiens
gccgcgccgccgcgccgccgccgcgcgcggaagcgaaaccacaacacccaaaagcaaggaaga

SEQ ID NO: 255177 - RNA, 84 nt, Homo sapiens
gacggaaacccagggccccagcgccgacggcgacgcggggccgagcaacccggcccggacaagagggaagagagaaaagacgac

SEQ ID NO: 255178 - RNA, 70 nt, Homo sapiens
gccgaaccgggagccggaccgggaccaggaccgggccccacccacaggagcgagaacccgagcagcgcca

SEQ ID NO: 255179 - RNA, 113 nt, Homo sapiens
aacagccagaccacagaagaagaacaagagagacagcgagccagagaccaaacaccgacaaaaagcgagcccgagaacacagggcgcggcagcgaaacagcagagaaggaacg

SEQ ID NO: 255180 - RNA, 56 nt, Homo sapiens
cacacaacccaagcgccaggaccgaaggaggcaccagggacccgggaacgaccccg

SEQ ID NO: 255181 - RNA, 60 nt, Homo sapiens
cggaggagcagcgggccagaacggccaggagacgcaacggccgggcccgggaggagcagg

SEQ ID NO: 255182 - RNA, 77 nt, Homo sapiens
aaaacagggaaaaacaccacagggaaaggaagaggaaaaccaccggcagcaaccaggaagaaggaagaggaaacaaa

SEQ ID NO: 255183 - RNA, 79 nt, Homo sapiens
cgaaaggcagccgcggacgccgcgccagcgacaaacaaccccgaggcgcgccagacacgagccagaccacagaggcagg

SEQ ID NO: 255184 - RNA, 64 nt, Homo sapiens
cgggccccagcagggccagagaccacggaagccccggacagcccagagcaagcacacggaggcc

SEQ ID NO: 255185 - RNA, 62 nt, Homo sapiens
ggccgaaggccaggaacaggacccgccccagcaggaccgaccaggccagagagcacgcagac

SEQ ID NO: 255186 - RNA, 91 nt, Homo sapiens
cgccaagagaggcggggcgcccccgccacgcagccggccaccgccgagacccagcacacgccgaccaggagaagcaggccaacagcaaaaa

SEQ ID NO: 255187 - RNA, 78 nt, Homo sapiens
aggcagaacgccaagccccgcgagcgcacgccaacgacgaggaccgacgcagccggcggaagaggaccaagaaggggg

SEQ ID NO: 255188 - RNA, 77 nt, Homo sapiens
aaggaggacgcagcgcaagaaacgaagggcaaaggcaaagggcagcgaggggcaaccaacgggacgaggcgaaaaga

SEQ ID NO: 255189 - RNA, 71 nt, Homo sapiens
aagcaacgcacacaacagcagcaggccaagggccgccacaacaacaccaggcacagccgaccccaggaggc

SEQ ID NO: 255190 - RNA, 72 nt, Homo sapiens
cgaagcgaagacagagaacgaagcgaccaaagcgcacggcagcgagaggggcagcgcggcacaacgcggcag

SEQ ID NO: 255191 - RNA, 77 nt, Homo sapiens
gaacgcccagccaaagaaacaagccgggaaagggacaagaagggcaaagccgaaggaagggacgcaaaaaggaagcc

SEQ ID NO: 255192 - RNA, 53 nt, Homo sapiens
gcgcagggcggaaggacaacagcccgacaaccaggcacgggccacagagacga

SEQ ID NO: 255193 - RNA, 53 nt, Homo sapiens
caaaagacaaacagggaaacgaccgggggcccccaaagggaagccaaacacaa

SEQ ID NO: 255194 - RNA, 56 nt, Homo sapiens
aacaacggccccacgagggcacaagacacagaagcacaacccaaccaagcagaaac

SEQ ID NO: 255195 - RNA, 57 nt, Homo sapiens
gaaaagcgcaggaacagggagacaacacggagggcgggacccgagagaacgcaagac

SEQ ID NO: 255196 - RNA, 77 nt, Homo sapiens
ggcgggaaaaagaggccaaagacgacagaacggcagcggagaaaacaaccaggaaggaaggagaaagacaaacccaa

SEQ ID NO: 255197 - RNA, 75 nt, Homo sapiens
agggcacccgccagccgacgaaggggagccacaggagagcgcccagaaaacgacagaagcacgacaacaacgggc

SEQ ID NO: 255198 - RNA, 76 nt, Homo sapiens
ccgaggggccgacgggagcagaggaagccgaggaccaccacagaaggaagaagggaaagacaaggagccgggccga

SEQ ID NO: 255199 - RNA, 88 nt, Homo sapiens
gggaaaagcacgaaacaaagaaagaaaccaagggggggcaaaccgagggacacccagcgagcacaagcacaaggcggacagcaaacag

SEQ ID NO: 255200 - RNA, 78 nt, Homo sapiens
gcacgccaacaagacggaagcagaggccagccggccgaccgcacagacgaccacacgcgccgacagagacgcccaggc

SEQ ID NO: 255201 - RNA, 56 nt, Homo sapiens
aaagcaccccaggacccagcacgcaagaacgaagaggggcacaaggccgccccggg

SEQ ID NO: 255202 - RNA, 73 nt, Homo sapiens
gaaaaaagaaccggaaccgcagacaaagaaagccacacacccgacacaaagaagaggcaggaacgaaccaacg

SEQ ID NO: 255203 - RNA, 69 nt, Homo sapiens
cccagaaagagacaacacaggaacaagcaccacagagggcaggcgccgggaggggccgggggccagccc

SEQ ID NO: 255204 - RNA, 85 nt, Homo sapiens
caccaggcacggccagaccccccgaggcccggggggcgcgggcaggaacccaagggcggcccgagaagcccaagcggcccggcgg

SEQ ID NO: 255205 - RNA, 72 nt, Homo sapiens
acagcccgcagccccgccagccacccccaggagggcaccggcgcacccgggacgaacgccaggacgagcccc

SEQ ID NO: 255206 - RNA, 86 nt, Homo sapiens
acaccacgagaacacagccgggcccggaaggggaaggaacgggagcagcgaaggcagccggaggaagaagagcggaccgcgcccag

SEQ ID NO: 255207 - RNA, 68 nt, Homo sapiens
caaaacccgcccggaaaggggacaccggagcgccccacaaaaccaagcgaggccaggccgccggaccg

SEQ ID NO: 255208 - RNA, 39 nt, Homo sapiens
ggccaggcgacccgacgggccaccggcccagcgggagac

SEQ ID NO: 255209 - RNA, 50 nt, Homo sapiens
aacaccacagcccacaaagaaaggcaaggaccgaaggacggaacaagcga

SEQ ID NO: 255210 - RNA, 78 nt, Homo sapiens
gaaagagacaccaggagacgggacaaccaaaccaccaaggagcgagaacccgagcagcgccagagcaacacaccgcgc

SEQ ID NO: 255211 - RNA, 56 nt, Homo sapiens
agaacccagaggcgggaggggccgggaggcagaggggcaggggacaggcaggagac

SEQ ID NO: 255212 - RNA, 117 nt, Homo sapiens
cgaaggcaaaaccaaacaccccagcccacagagagcaaaacacaagagagcagggaggagggggaagggcccggagaacacagcgcaagaaagcaggggcgaggggcacccccgggc

SEQ ID NO: 255213 - RNA, 90 nt, Homo sapiens
caaaagccaagaggaggacagcgcacacagcaagcacgagaacaacaagacggccgaagggcaccgaaacagaaacagccggccacgcag

SEQ ID NO: 255214 - RNA, 45 nt, Homo sapiens
aagaccaccagacgagaacagacgaagagcagacgaccgccggaa

SEQ ID NO: 255215 - RNA, 81 nt, Homo sapiens
ccgccagagcggggcacggagcggggagggaaacaaaagcagcagggcagagaaccgcaagccagggccagcagcggccca

SEQ ID NO: 255216 - RNA, 57 nt, Homo sapiens
acggaagaaagcaaagccagggagggagacggagaggcaagacagaagacaccagag

SEQ ID NO: 255217 - RNA, 96 nt, Homo sapiens
cgcgcaaggcacaagcaccagagaacaagcaccaaagcgaaggagggccgcaagggaggggggaagacagggcccagcaccacaggacgggccggg

SEQ ID NO: 255218 - RNA, 53 nt, Homo sapiens
cagcaacagacagaaacaccagacagcgacagggaaacacaaagaagacacca

SEQ ID NO: 255219 - RNA, 81 nt, Homo sapiens
caggggaaacagggccagagaggcccagggcgaaggaccccaacagcggaaaccacagagagaagccaacaaagaccagaa

SEQ ID NO: 255220 - RNA, 85 nt, Homo sapiens
ggacccggccgggagaagcagcagcgcaaggcgggacgaggccaacgagggcgcaagagggccaagagggacggcgggagaagcc

SEQ ID NO: 255221 - RNA, 72 nt, Homo sapiens
ccccgccgcggagcccgcagcccgccggcgcgccccacgggccaggagggccaagcagaagaaccagcacag

SEQ ID NO: 255222 - RNA, 73 nt, Homo sapiens
cagccacaaaagaccaaagaaaccagaggaagccaacggaaaggaagaagagaagaggaagaaaggacgaaag

SEQ ID NO: 255223 - RNA, 36 nt, Homo sapiens
cccccaagggcgggaacagcggaccagcagacaaca

SEQ ID NO: 255224 - RNA, 75 nt, Homo sapiens
ccaaccccacacaaggggcgaaggaaccgaaaggcaacggcagcagcaggcagccggcgaggggggagcccagca

SEQ ID NO: 255225 - RNA, 71 nt, Homo sapiens
acgaaaaggaacggggaaagaaacgaaacagaggagccgagacgcccaaagcacccaccacagcagacagg

SEQ ID NO: 255226 - RNA, 63 nt, Homo sapiens
cacaaacgcccccgccagcgagcaggcgccggcggcagagcggggagacgagacaaccgcccc

SEQ ID NO: 255227 - RNA, 88 nt, Homo sapiens
cgaaaggggccagaggcgcgacaccacccggggccaggccgagggcccgcccggccccaggagaagaaccagccgcagaggaggcgcc

SEQ ID NO: 255228 - RNA, 78 nt, Homo sapiens
cccgcccgcccccgccccacgaagccagaaagaagccacccagagagaaccagaacaccccaccagaccacccagcaa

SEQ ID NO: 255229 - RNA, 32 nt, Homo sapiens
gcagggcgcccccgcgaaaaggaaccagaaga

SEQ ID NO: 255230 - RNA, 62 nt, Homo sapiens
agaaaccccacccccaagaaccaacccccaaaggcgggacaggagagggaacggaccgaacc

SEQ ID NO: 255231 - RNA, 81 nt, Homo sapiens
cgcgaaagcgaagcgcgaaaaccagcaaggacgaaaagagagacgagacggaaccccgcaaagcagcaggggggcccagcc

SEQ ID NO: 255232 - RNA, 58 nt, Homo sapiens
cagccaggaaaaagagcaacaggagaccggcagaccagggccagcggcccaggcggag

SEQ ID NO: 255233 - RNA, 33 nt, Homo sapiens
cggagggaccggcgaaccgccccccaagacacg

SEQ ID NO: 255234 - RNA, 72 nt, Homo sapiens
ccaccggccgcccagccaggacgcgcccggagaagaaacgacagggagaaaaagcaaagaagacagcaaaga

SEQ ID NO: 255235 - RNA, 65 nt, Homo sapiens
cggggacccccgacgccaggcagcgcccccaaacgcaaccgggggcgacccggaagcggacccca

SEQ ID NO: 255236 - RNA, 75 nt, Homo sapiens
gcgggcccgaggccggaggaacccggacccggcgagcggaccccgcgggcacggcgggacgggacaagacaccaa

SEQ ID NO: 255237 - RNA, 90 nt, Homo sapiens
gcagcccgccccaggagagagggcgaagccacgaagaggcgcagccaaacccccccccacagcaacaaagcggccccccccacagacggg

SEQ ID NO: 255238 - RNA, 70 nt, Homo sapiens
ggccgcacggcccacgcgaggcacagaaaagaaacagaaaagaaacaaagaaccagacggccaacgacca

SEQ ID NO: 255239 - RNA, 60 nt, Homo sapiens
ggggccgcgccacccgcaaacagggcagaagaagccacacacagaagacccaaagagaac

SEQ ID NO: 255240 - RNA, 72 nt, Homo sapiens
ggccagcaacggcacgaccagaaaaccccggaggggagcaccagaagagccagagcccagcggcaggggcgg

SEQ ID NO: 255241 - RNA, 103 nt, Homo sapiens
aagaaaccgagcacccagagaaagcaaaccaggaggaggacacccggaagaagcgaaggacggaaaagagaaaagcgaaaaaccacacagagagaggcgcccg

SEQ ID NO: 255242 - RNA, 77 nt, Homo sapiens
ggggggaccgcggcgcaggacgccgacacgggccgcgccagggacgcaacccaccacgaagcggagagcaggaaggg

SEQ ID NO: 255243 - RNA, 81 nt, Homo sapiens
aaagagacccgcagagccacagggcagggaccaagaaaggcccagggaccaaagcccggacaaggcccgagcaccaggacc

SEQ ID NO: 255244 - RNA, 72 nt, Homo sapiens
cccgaagccaacggggggcaaggcgcgaagacgccaaggaagacagccgccaccaggcgcccccccagcaac

SEQ ID NO: 255245 - RNA, 81 nt, Homo sapiens
cgaagcagccgggagccggagcgggcgcggacgccgaggcaccgaggcaccagaggaggcaaaagcagaccggaaaaccca

SEQ ID NO: 255246 - RNA, 55 nt, Homo sapiens
aggccaccagaggagcagaaagcgcacaaagacggcgaagaaacaggaagaaaag

SEQ ID NO: 255247 - RNA, 75 nt, Homo sapiens
accggcgagaggccacaaggcacgggggccagcaaccaccaagggaacagcacaggacagccccccgaagagaag

SEQ ID NO: 255248 - RNA, 51 nt, Homo sapiens
aggcgaagccacaaaggaaaaggaggcaccgcgcgcaagccccggggcaga

SEQ ID NO: 255249 - RNA, 77 nt, Homo sapiens
gggaggcagaggggcagggccaaaagcgagacaagacgaaaggacgccacaaggagcaaagaagaaaagaaaggaag

SEQ ID NO: 255250 - RNA, 76 nt, Homo sapiens
aggcagcgagaagccgaaccaccacacacaaaagcaccagagcgagggggaaaagcaaaagcagaggggcccaaaa

SEQ ID NO: 255251 - RNA, 75 nt, Homo sapiens
acgggggaggaggcaacgccgcgaacacaggcacagaagcggcaggaaagccccgggcagcccacgagacgaaca

SEQ ID NO: 255252 - RNA, 76 nt, Homo sapiens
caggacggcagacaccggaccaaaagaggcgaagaaacgcgcaaagcaagacagaccaggagagcaccaaacgccc

SEQ ID NO: 255253 - RNA, 79 nt, Homo sapiens
gaacagacccaggccagagggaaaagcaagagcccaaagccagaaggacaaaagagaaacaggaggcagccaaaccaga

SEQ ID NO: 255254 - RNA, 59 nt, Homo sapiens
ccggggcaccagggaaaacacacccgagacccagacagaggccgcaagggcgggggaaa

SEQ ID NO: 255255 - RNA, 75 nt, Homo sapiens
ccggccaccggccccacacgaccggagagaaaaggaaggccggagaaaaacagagacaccgcagacagcgggaaa

SEQ ID NO: 255256 - RNA, 78 nt, Homo sapiens
ggagaggacaagaccacgagccagggcaacagggcagcggccaaccgggcgggccaggccccgcggcccggggaagca

SEQ ID NO: 255257 - RNA, 79 nt, Homo sapiens
caccccaccccaacgcgaccgcaacggcaacccaccccaagcagagcgcaagcaagggagaggagggagaagccgccaa

SEQ ID NO: 255258 - RNA, 79 nt, Homo sapiens
cggggcggcggcgccgggggccggggagcgccagcaagaacaccaaaccccccggaaagaagcaacgagaaaccccaag

SEQ ID NO: 255259 - RNA, 78 nt, Homo sapiens
ggacaaaggaacaggaccagcgacagggcagcccgcagaggaccgcacgaacgcaagaaccacagcagagccgcgcga

SEQ ID NO: 255260 - RNA, 74 nt, Homo sapiens
gaagaaaaggcagaagaagaggaagaccggggcagaacagaacacgaaaagccaggcgaacacgcagcaaagaa

SEQ ID NO: 255261 - RNA, 78 nt, Homo sapiens
caagagcccgaggcaccacccaagcgagagccacgccccaacaaccagagggcaacagaaaagagcgggccaaaggac

SEQ ID NO: 255262 - RNA, 55 nt, Homo sapiens
ggccccgccagacggagaaagagaagcagaaggaaggacgggaggagcgcacagc

SEQ ID NO: 255263 - RNA, 75 nt, Homo sapiens
aggagggcaggaagagcgcagcggggacaaggagaaacaggcgccaaacgacagagaccccaccacgggccggcg

SEQ ID NO: 255264 - RNA, 58 nt, Homo sapiens
gagggcgcaccaaggaggaaagaggcgcagaaagcggcacaggcagagaaagcaagag

SEQ ID NO: 255265 - RNA, 72 nt, Homo sapiens
gacgcgcgagccggccggggggaaggaccgcgacgagaagagcaaaacggagcccaaaaaaggaccaacgag

SEQ ID NO: 255266 - RNA, 77 nt, Homo sapiens
aacaaggacgcgagccagaaacacgacgcagagaagggaccacagaccagcacgccggcgccacgaaccgagcgaca

SEQ ID NO: 255267 - RNA, 76 nt, Homo sapiens
cggggaccagacagagaaaggcacgggaagaagcaaagcacacagagaggaaacgccaaaagaaaacggaggaacg

SEQ ID NO: 255268 - RNA, 74 nt, Homo sapiens
ggacaacccgcaggaagccccgacccagacccaggcgggccggacccagcagggcccccggaacaaacccggga

SEQ ID NO: 255269 - RNA, 60 nt, Homo sapiens
aagcgaacaacccgagccagaaaacaccaggagcacaaaaggccgcagcgagccgccgca

SEQ ID NO: 255270 - RNA, 84 nt, Homo sapiens
gacgcccaagccccccgcccggccaaggccagacgccgggccccagacccggcccacggagagccgcaggagaaggcgcagggg

SEQ ID NO: 255271 - RNA, 74 nt, Homo sapiens
acgaagccgcgcagcggaccagaaacccaaacgcaccaacaggcaaacaagcgaaaaacagacaagaaaccgca

SEQ ID NO: 255272 - RNA, 73 nt, Homo sapiens
caggaaaccaagacaagaggcacaaaaagaacaaccagaaggaacgcagagaccgacggagagcagccacaag

SEQ ID NO: 255273 - RNA, 50 nt, Homo sapiens
cggaaagagcgacaaacaaagaaagacggacggagagcccagagacaagc

SEQ ID NO: 255274 - RNA, 81 nt, Homo sapiens
ggggagggggggaccacgaaaggagcaagagcaagacaccggacaccgagggcccccaaaagcaagacaaacagagaacag

SEQ ID NO: 255275 - RNA, 61 nt, Homo sapiens
agagcaagcggacaaaagaaggccaccggcgccagagcaagcccgccccgagccaaaggaa

SEQ ID NO: 255276 - RNA, 82 nt, Homo sapiens
cggccagcaggaagagaggcccacgcagaagccaccccgcacagagggacgcaacaccgcagggcccagacacgcacgcccg

SEQ ID NO: 255277 - RNA, 79 nt, Homo sapiens
gcacgagcaccggaccgcagcagcagacgaccgcagggccagcccacggacaccccgggccaagaggacaacaagaagc

SEQ ID NO: 255278 - RNA, 79 nt, Homo sapiens
agcgcaggcgaccaaggagaccaaggaccggacagaggaagaaacccggaaggggaagaggaaagcaaaggcgcaggaa

SEQ ID NO: 255279 - RNA, 84 nt, Homo sapiens
ggaggaggagcgggcgagaagcgccgccgaacgacaggacgggggcggccggcccccagcagaggcggagcacagagagcgcgg

SEQ ID NO: 255280 - RNA, 66 nt, Homo sapiens
gcacaagaagaagacgaggcgaacaagaggcgccagcgggcgcgccggaagaacagcgccacgcca

SEQ ID NO: 255281 - RNA, 66 nt, Homo sapiens
ggcaagccgggaacgcaaaaggaccagccagaagaccgcccacaaagaccaccggcaccagccacc

SEQ ID NO: 255282 - RNA, 35 nt, Homo sapiens
cagaaccgaagaaaaagcaaccaaaacaggacaag

SEQ ID NO: 255283 - RNA, 84 nt, Homo sapiens
cggacacaagaaaaagagcgaaaaagacacgccggggggcaaagaaaaaggagagaaaaagaggcaaaacaacaagaagaaaag

SEQ ID NO: 255284 - RNA, 54 nt, Homo sapiens
acgaaagagagaggccgcaagaagaacaggcacagagggaagacaaagacggag

SEQ ID NO: 255285 - RNA, 75 nt, Homo sapiens
agccccagcgccagcggcacggccggacccgcaggcgaagcccgaagagagcacagggaaaagcagccggcgcca

SEQ ID NO: 255286 - RNA, 71 nt, Homo sapiens
cacacaccccgaccacgcggccgagagaccggcgggggcccagggccagcgcggcaccgagagaaccccag

SEQ ID NO: 255287 - RNA, 66 nt, Homo sapiens
gcccgcagcaagaggcggacgagaaggacagggaaggcacacacggcagccgccagagaaccccca

SEQ ID NO: 255288 - RNA, 77 nt, Homo sapiens
caagaagaagccaaccaaggcacaaacgcccgagggcagcaacagcaaaacccccaccggacagggaagggcgccgg

SEQ ID NO: 255289 - RNA, 74 nt, Homo sapiens
acacgccaccgaggcaacacagccagagagacaacgagaagccgagaaaaaaaaggaacgcgggcagacagacc

SEQ ID NO: 255290 - RNA, 78 nt, Homo sapiens
acggaggagcaggcgagaagagaaggcaggggaagggacgggaaggcagaagaaggcagaggggggaggagggaaggc

SEQ ID NO: 255291 - RNA, 76 nt, Homo sapiens
ggcggagggggccggagggaggcggcggggagccgccaccaaaagcagacggaaaacccacggggaagaccacacc

SEQ ID NO: 255292 - RNA, 77 nt, Homo sapiens
ccaacgagcaaacagaaccagcagaagaggacaccagcccgggagaagaggcaacacccgagcggggcccgaaaacg

SEQ ID NO: 255293 - RNA, 76 nt, Homo sapiens
ggccagagcaaaggcaaaagaacgccaccgagaagcgccaccaacaacccagaaacagcagaagggacagaggggc

SEQ ID NO: 255294 - RNA, 81 nt, Homo sapiens
gcgggccccgccaccggcacaccgaaggcaccaggaagaagaggcggaagaaacaacaagcgcaaggagcgcccaaaccac

SEQ ID NO: 255295 - RNA, 39 nt, Homo sapiens
ggacgcgacgggggagagggagagcgaacagagacgacc

SEQ ID NO: 255296 - RNA, 74 nt, Homo sapiens
gggaccgcccagccccacacgcagagaacacggaccagaaaccacacacagacacgagagagaaggagcgcgag

SEQ ID NO: 255297 - RNA, 80 nt, Homo sapiens
agagcagccccgcgcgcgcgagagcccacgagcgaggccgcaggggagcccggcagccgcccgcgcgaagaaagagacca

SEQ ID NO: 255298 - RNA, 74 nt, Homo sapiens
ggaacggcagaggagcgggcgagcccagaaggagaggagcacggcagccaggaggccgacccgacccggaccgc

SEQ ID NO: 255299 - RNA, 75 nt, Homo sapiens
gaaggagggccggcagcgcccgcggagacggaagaggaccagggaacgggacacacagacggaggaaacgaaaag

SEQ ID NO: 255300 - RNA, 72 nt, Homo sapiens
agacccggacggaacaggcaaaagaagcacaggggaggggaagcaacagggcggggggaaccgccaccaagg

SEQ ID NO: 255301 - RNA, 71 nt, Homo sapiens
cacaacaagggcgacaaagggccgcgggccaagagcaaaagccgaccgcagagaccaagagagcagacaag

SEQ ID NO: 255302 - RNA, 75 nt, Homo sapiens
cagcaagaggagcagccagcggcagaccaccagccccgccaggccacaagggagcaccagccgaagcagaagcgc

SEQ ID NO: 255303 - RNA, 89 nt, Homo sapiens
ccaggggcgccgagcgggggggcgccaagcgcgaggaccgggcgcccgcgagacgaggagcgggcgcccaggcggaagccaccagcccg

SEQ ID NO: 255304 - RNA, 80 nt, Homo sapiens
gcggaggagcgaggcagcgacaggacgggaacgggcgagaacgcggacaagcaaacaaagaggaaaaagagggcaacagc

SEQ ID NO: 255305 - RNA, 84 nt, Homo sapiens
ggagcacaagaccaaccacgaacgcggacgacccggcgagggcccaccacgagcccgaagcgcggaaaaggaacagaagaggaa

SEQ ID NO: 255306 - RNA, 77 nt, Homo sapiens
accccggcgccggaaaggcagccaaaggaccgcgcagacgcgcaggacggagcggggccaggcggccaggacggcgg

SEQ ID NO: 255307 - RNA, 69 nt, Homo sapiens
caagaagggcccaacaacacgcagcgaacgccacacaggaacgaggaaaaggcaaaagcgccagcggac

SEQ ID NO: 255308 - RNA, 84 nt, Homo sapiens
gcaggcccccgcccccgagcagccgagggacagagcagaagggcgaaagaccgggccgcagaagaggccccaacccgggccaga

SEQ ID NO: 255309 - RNA, 90 nt, Homo sapiens
aaccccaaggaggacgagggccgggccgggcgcgggcgagaaagggagggagcaacgcgagccaagcagcaggccccaaaaaggagaaag

SEQ ID NO: 255310 - RNA, 75 nt, Homo sapiens
aaaagcgccagcacgaaaccagacccaaacacgggaaaagcagacgccaaacgcgaaagggagaaagaagaacgc

SEQ ID NO: 255311 - RNA, 73 nt, Homo sapiens
aacagcaggccaaagaccagagccaaggccgacaaaaccggccgggaagcaagaaaccgaccgccgggaacgg

SEQ ID NO: 255312 - RNA, 71 nt, Homo sapiens
acaaagccaccgacaccccgaaaccgcccccgaagaagcccagcagaagacgggacaaacagccccaaaga

SEQ ID NO: 255313 - RNA, 81 nt, Homo sapiens
gccaacaggcggcgcccagggcgccaccgccgccgcagagaaggagaagaagcaccagccgacgcgaacggaacacccggg

SEQ ID NO: 255314 - RNA, 78 nt, Homo sapiens
cagggggagcagggcgagagggcaccgcggacggggccgcccagcgggagggacaggagaacaggcacgaccccaccg

SEQ ID NO: 255315 - RNA, 53 nt, Homo sapiens
aaagacccggcaaagccaaccggaacacgaccccaccaccagagaagaggcag

SEQ ID NO: 255316 - RNA, 71 nt, Homo sapiens
ggaagacagaacgccggcccagccccagcggcagacggaaacgacagaagcagagagcgccgcacccaggc

SEQ ID NO: 255317 - RNA, 84 nt, Homo sapiens
caaaaggaagcccaaaccagagcaagggacgaggcacgaccaaagagagcagcacgacagcaaccgaccacgccaacggccggc

SEQ ID NO: 255318 - RNA, 81 nt, Homo sapiens
aggagccacggacaagaccaaaaggccagagagcacaagaagaaggacacacccaggggacacaacaacgggagagcggac

SEQ ID NO: 255319 - RNA, 73 nt, Homo sapiens
cgacccccggccaccgggcgggaagagaaacgggcacaaggacgccggagaggaccgggaaggcaaaggaaag

SEQ ID NO: 255320 - RNA, 89 nt, Homo sapiens
cacggcagcaggaacgggcacgcgccaccgggccgacgggagaccaggcccaggaaggaacgaggaagggccagaacggagacggggcg

SEQ ID NO: 255321 - RNA, 82 nt, Homo sapiens
caccagcagcccccagagcgggaccacaggaaaggagagacccaggccaaagaaggagcgacccagaaaaacaaaaagggac

SEQ ID NO: 255322 - RNA, 77 nt, Homo sapiens
agaccgggaccgggcgccacgcgggggcaagacgaaggagcgggcagagcaaaaaaagaaacaagagaaggaaaagg

SEQ ID NO: 255323 - RNA, 55 nt, Homo sapiens
ccgagaaccgcaggagccagagggggaagaccggcaagaagagcacagagaaaag

SEQ ID NO: 255324 - RNA, 85 nt, Homo sapiens
agaaaagcccgggagcagaagggaggcccaagacccacaacaaaagcggacacagacaggcaggagaagaaggagcggcagaagg

SEQ ID NO: 255325 - RNA, 84 nt, Homo sapiens
ggggacaagaaacagagcaaaaaccggaaagagaaaaaggcagccccggagacgaaaagacaaagcaccaccaacagacgagga

SEQ ID NO: 255326 - RNA, 57 nt, Homo sapiens
gcgaaaacccgacagggccggagaagaccggaaggcacaagcaacgggcagggagag

SEQ ID NO: 255327 - RNA, 72 nt, Homo sapiens
cccacccaccagggaagcccgcacgcggaagcgccagaaaaacacaccgacagcagaacacacgcgaaagga

SEQ ID NO: 255328 - RNA, 75 nt, Homo sapiens
ggacgcccaccggggacccgccccacggacggcagaaggcacacgcagaaggagacccaacaccccggccagacg

SEQ ID NO: 255329 - RNA, 62 nt, Homo sapiens
cgcagcccggaaagccggcaagacgagaaagcagggacagaccagccaccacgcccgcccac

SEQ ID NO: 255330 - RNA, 82 nt, Homo sapiens
agaaccccccgagggagcagcggaggaaggaggagcagcagaccggacgggacgccccggacaggaccagaaaccacggcac

SEQ ID NO: 255331 - RNA, 76 nt, Homo sapiens
aaagagcccggaaagaagcaacagagaggggagaacccacagggccgcgagggcccggaacaggggcacgcacgag

SEQ ID NO: 255332 - RNA, 78 nt, Homo sapiens
acgcgcggcggggcagaccgcggggacgcgggcggcgcggccgcgccagacagcaccaggacaaaagaagggcagcac

SEQ ID NO: 255333 - RNA, 58 nt, Homo sapiens
aacaagcaacggcggcccggggcacaacacaacaacaaaacacaacccagccgggaag

SEQ ID NO: 255334 - RNA, 75 nt, Homo sapiens
aagcacgcacaccgggcagggccgagaggacgccagcggcgcgcagggccgaaggcccgagcccggggagacccc

SEQ ID NO: 255335 - RNA, 51 nt, Homo sapiens
aaccgacacagaagcacggagcccaagagggggcggagcccggacggaaag

SEQ ID NO: 255336 - RNA, 61 nt, Homo sapiens
gcaccagacagaagacacggcccaggaggagaaccaggaccaaagcaccagcacagaaggg

SEQ ID NO: 255337 - RNA, 78 nt, Homo sapiens
cggacgggaacgacgcgagcagaagaggggcccagagggcaggagaggaagcaaacccaaggggaaaggagcagagcg

SEQ ID NO: 255338 - RNA, 73 nt, Homo sapiens
caggaaacgaagcccgagcgacaacagggaaaaagcggggaaggggggcaaaaaaaagaagcaagcgaagcac

SEQ ID NO: 255339 - RNA, 34 nt, Homo sapiens
agaacgccacgccaaacggggagcgacacccaac

SEQ ID NO: 255340 - RNA, 105 nt, Homo sapiens
cggcggggccccggacccgcggcgcacaccccgcccagcgcagagccggcaggcgcccgagcacgccaaccccaaccccacggacagcgcccccaccgaacacgc

SEQ ID NO: 255341 - RNA, 71 nt, Homo sapiens
aaaaagcaaacggaccagaccgaccaccaaaaagagcccgagggaaaagacaggcaacaggaaagcaaggg

SEQ ID NO: 255342 - RNA, 79 nt, Homo sapiens
gccggccccaaagcaccaggccaaacgagaccacacgaccgccaacacagacaaccacgaagaaagccaaaaggcaaaa

SEQ ID NO: 255343 - RNA, 60 nt, Homo sapiens
ccggggcaaccggagccccccaggaggaggcggaagggaaagaacgcacaacacccgaac

SEQ ID NO: 255344 - RNA, 89 nt, Homo sapiens
cgaggaggaggagggggaagcggcggcggcaaagggcgaaagacaccagcacccgaggccagcaacaacaccgccagcaagcacaagcc

SEQ ID NO: 255345 - RNA, 79 nt, Homo sapiens
gaggaacagagccccgaagaggcaccagggggcggcaccccggggggccggccaaggagcgaaaaggaccaaccaggcc

SEQ ID NO: 255346 - RNA, 33 nt, Homo sapiens
aaggaccaagaaccagcggacgacagcagacga

SEQ ID NO: 255347 - RNA, 72 nt, Homo sapiens
acggcgacccggggaggcgaagcagaaggagacgccgagagcagaaacccggacgacggagaacccgcgacg

SEQ ID NO: 255348 - RNA, 81 nt, Homo sapiens
gggagcagggaagacgccgcgccaccgagccggaccggagacggggccaacaggggccgacagcccagcccccggggggag

SEQ ID NO: 255349 - RNA, 82 nt, Homo sapiens
ccgcgccccaccccgccagcccagagccacgacggccaggaccccacaccaagcacgcccggagagcgccgcgacggggggg

SEQ ID NO: 255350 - RNA, 56 nt, Homo sapiens
gccagaaggaccggcggacacgaggggggggcccagggggacgacaaagagaggcc

SEQ ID NO: 255351 - RNA, 59 nt, Homo sapiens
accggaggaggaggccacacagaaggacggcccgacggaagaccaagggaacggaagcc

SEQ ID NO: 255352 - RNA, 76 nt, Homo sapiens
agagagggaagagacagccagcacaccccgcgagcaagggaagagcgagacaagagccaaggacagggcccgccac

SEQ ID NO: 255353 - RNA, 74 nt, Homo sapiens
cgcagcggcggcagcggagagcgagagaggggagcagggcgcacaaaagagcacaaaagcaccaaggcgcacaa

SEQ ID NO: 255354 - RNA, 79 nt, Homo sapiens
gcgcgccccaagagcaaaagaagccagcccaaggacgccacaagaagaagcgacagcggagaacccgcagacgcgccca

SEQ ID NO: 255355 - RNA, 58 nt, Homo sapiens
ggacgaacaaaacagcggaaaagggcacagaccaggccccgagcccgagcccgaagcc

SEQ ID NO: 255356 - RNA, 51 nt, Homo sapiens
agagcagagagaaggcagggcaaaccagaaagacgaaaagagcagggggaa

SEQ ID NO: 255357 - RNA, 77 nt, Homo sapiens
caacaagcgggaaggcgaacgcggcgcaagcgacgagccgccaggcacagagaaggcaaacgggagggcgaggacac

SEQ ID NO: 255358 - RNA, 48 nt, Homo sapiens
cagagaaccaagcggcaaagcaccgaacggaaccaccggacaaacacc

SEQ ID NO: 255359 - RNA, 71 nt, Homo sapiens
ggaccgcacccgcggagacggacgcccgagaaaaaaagaggcgaccagcccgggggaaaagaagagaacgg

SEQ ID NO: 255360 - RNA, 83 nt, Homo sapiens
cgagagcgggacaggcgagcgaccgaggggaagaaggcccccaaaaaggccacaaagacagccccaccgcccgccacaggaga

SEQ ID NO: 255361 - RNA, 75 nt, Homo sapiens
acaagagcggacaggaagaccggagaaacaagggaaaaggcgaaaaagcaaagaacaggccacagaaaagaacag

SEQ ID NO: 255362 - RNA, 75 nt, Homo sapiens
aggcgcgcaggagccaaggggagaaggacggcagaaaacgagacgccggcggcgaaaaaaggggacaagaccgga

SEQ ID NO: 255363 - RNA, 111 nt, Homo sapiens
aaaagcaggaagaagcaaggcaccgaacaaggaaaacaaggcacaagagacagcgaagccaacagagaaaaaggaccaacaaaaagaacaagaaaagacagccaggcaaca

SEQ ID NO: 255364 - RNA, 76 nt, Homo sapiens
ggaggaggcggccggagggcggcagagaggccccgagacccagaacgcaaaaccaaggcccggcagccacccaccc

SEQ ID NO: 255365 - RNA, 76 nt, Homo sapiens
cggcagggaggagcgcagggcgagccggagagccggccgagcgaggcggcgcggccagaagagagaggggcgccgg

SEQ ID NO: 255366 - RNA, 73 nt, Homo sapiens
cagaacaccagaacagcggccacccgacagcaagcaccggagggagaagacaggaccaagcacagagggcgga

SEQ ID NO: 255367 - RNA, 43 nt, Homo sapiens
cgccgccgggaccccgcccagcaggcggagaaagacgacaacc

SEQ ID NO: 255368 - RNA, 79 nt, Homo sapiens
caaagcggaagcggacaagggcaccacacggcaacaggcgacgggcggccaacacacagacgcccagacggcgaaggcg

SEQ ID NO: 255369 - RNA, 76 nt, Homo sapiens
acccgcaggcccccacagaagacaaggaagaggaccccaaagcaacaccagagacaggaaagaggaagaaaaagaa

SEQ ID NO: 255370 - RNA, 77 nt, Homo sapiens
ccacagcccaacaacaggaacgaacgggacagagggggacagcgaaacggaaagcaacggcgcaagcggcggcggcg

SEQ ID NO: 255371 - RNA, 57 nt, Homo sapiens
caaagcgcacggcagcgagaggcccgagagcacccagccccagcgagcgaccaccag

SEQ ID NO: 255372 - RNA, 62 nt, Homo sapiens
caagaaaccaggaccccgaacccagccacgacagccgcagaggcaaaaacaagcaaacccca

SEQ ID NO: 255373 - RNA, 77 nt, Homo sapiens
gccggaacacgccccgggcagggcggccagagaggcagaacgaagacaaagccaccaagaaagaaccacaggggaag

SEQ ID NO: 255374 - RNA, 74 nt, Homo sapiens
acccaaggaaaaacaggacaaaggaagccaagcaggaggcaacaccagaaccgcaccgccgcaccagggacacg

SEQ ID NO: 255375 - RNA, 71 nt, Homo sapiens
ccagggcccgcagcgagggagaagaaaggccagaagcaaaacgcagagaaggaccaccgccaaacaaaaaa

SEQ ID NO: 255376 - RNA, 71 nt, Homo sapiens
cagagccgagagaccagggcgaccgcggagcgaggacagggaacaaggccgccgaaaaacaacaaggaaaa

SEQ ID NO: 255377 - RNA, 87 nt, Homo sapiens
cgccagcagccgccggagccagccaacgagcggaggagagaccgccgggcgcaggcacaggaacaagccaccacccagggcaagccc

SEQ ID NO: 255378 - RNA, 38 nt, Homo sapiens
aggcagccagcagggggagggccagcagaacgaagggg

SEQ ID NO: 255379 - RNA, 80 nt, Homo sapiens
cagggcagcacagagaccgcgaaagcggaccaaggaaccaggaaaggagcgagaaaccaacaaggcgaaagcccagagcc

SEQ ID NO: 255380 - RNA, 80 nt, Homo sapiens
gcccccggccgcccccgcggacgccagggcgccgcggaccgcgcggggagagcagaaagacgagccgccggggaaaaagc

SEQ ID NO: 255381 - RNA, 78 nt, Homo sapiens
gacaagccgggagcgggcggccaaccagaagaggccccaggaccggcgaggccccccccccagcagcaaagggacagg

SEQ ID NO: 255382 - RNA, 65 nt, Homo sapiens
ggcaggaccggcgcccaaggagaggccaaagcgcaagccccggggcagagacacaggacacccac

SEQ ID NO: 255383 - RNA, 81 nt, Homo sapiens
cagcgagccggcggagccgcggcgggacgcgcgagccggccggggggaagcagcaagagcaccgcgacccacaaccgcacc

SEQ ID NO: 255384 - RNA, 103 nt, Homo sapiens
caaacaaagacaggagaaacaaagagaaagccaagaagaaggaaaccagccaccccagaggcagcggcaacgcccacccacggcccccgagaacgaaggaaga

SEQ ID NO: 255385 - RNA, 75 nt, Homo sapiens
aaggaaaccaaaaacggccgacaccaaaagcaaagcgcaggccgaaaaaggccgaaaaagaagaacgagaagcag

SEQ ID NO: 255386 - RNA, 72 nt, Homo sapiens
aaaagagccaacaagacgccccaaaggcagcggaagacgcaaacacaaggaaggaaccaaccgaggcagaaa

SEQ ID NO: 255387 - RNA, 84 nt, Homo sapiens
agcccgcaagaagaacagagacagcagccaaacccccaggagaccagcagcagacacccaccacggagacaaggaagacacgca

SEQ ID NO: 255388 - RNA, 74 nt, Homo sapiens
gacgcccgcccgcagagaggccggccgcgcggagcacgcggagccgcccaggcagacgcagccgagacaccagc

SEQ ID NO: 255389 - RNA, 37 nt, Homo sapiens
ccggaggcggccgcaccggagacgaagaggagcagaa

SEQ ID NO: 255390 - RNA, 87 nt, Homo sapiens
acagaccaagagggaagccaaggacgcgaacggcgaacaagagcaacgagggagagaagagacgaggaggaggggagaccgcggcag

SEQ ID NO: 255391 - RNA, 76 nt, Homo sapiens
aaaacaaacagcggcgacacaagcacgcggggaaacagcagcagcggaagcaaggcaacggggcccgccggcaagg

SEQ ID NO: 255392 - RNA, 71 nt, Homo sapiens
caacagaccccaaccccaggcgccagccggcgggccaggaggaagggccccacaccaaaccgccacgcaac

SEQ ID NO: 255393 - RNA, 82 nt, Homo sapiens
ccggagaggagcagaggccaggcgcgccgggagaagggagggcaagcagaaagcagaggaaaacgaacaacacccaaagcca

SEQ ID NO: 255394 - RNA, 82 nt, Homo sapiens
cagggcccgaccgcagggagcagaggggacagaggcaccaaggaccccaagacagaaggccgggacagcagaaaacagccag

SEQ ID NO: 255395 - RNA, 73 nt, Homo sapiens
gaacagaagagcaaaccaggcgcgcacggagaaagaagagaaggcccccccccaggcgaccggcccgaggacc

SEQ ID NO: 255396 - RNA, 86 nt, Homo sapiens
ccagccagcgaaccggcccaaagcaaaacgccagcgagaccagccacaggcccaggagggaacaacagcaacaacacgcaagcaag

SEQ ID NO: 255397 - RNA, 71 nt, Homo sapiens
cagcaaggagagccggggagcccccaaaagccgcagagggacaaaaaaaacaaaacacgaagcgcaacaaa

SEQ ID NO: 255398 - RNA, 70 nt, Homo sapiens
cccacaaggggacacggcccgacgcggagggccggcaacggccacagcaccggggaccgccgcgccgacc

SEQ ID NO: 255399 - RNA, 40 nt, Homo sapiens
gcgaaggaccgccccgccagcaaaaaacccagaaggggag

SEQ ID NO: 255400 - RNA, 73 nt, Homo sapiens
caagagggccgggacagcgcgaaaaccagagcgccaagagccacccaggaaggccgcaggagaaaggcaagga

SEQ ID NO: 255401 - RNA, 54 nt, Homo sapiens
accggacagaagcgcggcggcgcggcgagcgggccgcacgggggaaagggagac

SEQ ID NO: 255402 - RNA, 80 nt, Homo sapiens
cgagagcccgcgcgagcgggagcgggcccgcgcgccgagggcgaggcggacgcgcggcgcgcaggcagggaggcgaccga

SEQ ID NO: 255403 - RNA, 71 nt, Homo sapiens
aagagaggagccgagaaccgggcaaagacgacgcggagaggggagaagccaaaaggacaggcagagggccc

SEQ ID NO: 255404 - RNA, 57 nt, Homo sapiens
gccagacaaacgcagaccaagcgaagcacccagcccgaaggaaagaggcagaaggcc

SEQ ID NO: 255405 - RNA, 57 nt, Homo sapiens
ggagccaaggagagagaggagggggggccgaagaagccagggggaggaaagcagaca

SEQ ID NO: 255406 - RNA, 67 nt, Homo sapiens
acacagaagccacccaagaggcagaccagagggaccaccgagcggaggacagaaaacagaccaacaa

SEQ ID NO: 255407 - RNA, 69 nt, Homo sapiens
gccccagcgcgcaaggcagcccgcaacgcaccagacagggacggcagacaaggaaagcagcacacgcac

SEQ ID NO: 255408 - RNA, 63 nt, Homo sapiens
gccaacccgacacaaggacccaccacggggccccaaacaggcgggacagggagcaacaccgga

SEQ ID NO: 255409 - RNA, 78 nt, Homo sapiens
cgaacaaacagcaagaaagaccacaagaccaggaggggccaaagggagagggacaacacacgagcacaaacacaagcg

SEQ ID NO: 255410 - RNA, 59 nt, Homo sapiens
gcagcgcccagcagcgcaggcccaaacaggcagcgagggccggaaagccccagggcacg

SEQ ID NO: 255411 - RNA, 78 nt, Homo sapiens
gcacgagcgggaccgcgagcagcgcgggcggcagcccgggggaagcgaaccacgaaagagcagagggaagaaacccgc

SEQ ID NO: 255412 - RNA, 86 nt, Homo sapiens
ggaagacggcagcggccccggagacacaccgaggcgggccaggccagcgggccggggagcgccagccgagaggagcgcggagcgcg

SEQ ID NO: 255413 - RNA, 80 nt, Homo sapiens
gccgaaagaacagcagcacagggaaccagaccgggacagagcccgcacgcggacacgcagccagcaaccggaccgaagcc

SEQ ID NO: 255414 - RNA, 86 nt, Homo sapiens
gggaggcagcgcgggacccagcccaggcggcgcggacggggcggggacagagaaggcgaagaaggggagaaacgaggcacaaaaag

SEQ ID NO: 255415 - RNA, 68 nt, Homo sapiens
cacacccgcccccggagagagcacgaaggacccagcagggcaccaggcaagcggcagccacacccgga

SEQ ID NO: 255416 - RNA, 70 nt, Homo sapiens
gcgccaagaggaacaaggacagcaaacaaaggggacagaaaaaccgcgacacagcaggaggaccggcaaa

SEQ ID NO: 255417 - RNA, 81 nt, Homo sapiens
gaaaggagcacggcagaccgggcgagcagagaagaagcagaccggggaagaggaagcggagagaagaaggaagcccgcgac

SEQ ID NO: 255418 - RNA, 79 nt, Homo sapiens
agcccaccccagcgcgacgcggcgagcccaaaaagcccgcaggggcgagggaggaaacccgaccgccccaggggcacag

SEQ ID NO: 255419 - RNA, 71 nt, Homo sapiens
gcgacggcggcccgaagccagcgccccaccggggcaagcagggaagccgagaacgagcaaaaagcagaccc

SEQ ID NO: 255420 - RNA, 58 nt, Homo sapiens
ggaagcaaagcgcaacagaaacagagagaacgagagagccaggccagaaggaaagcgg

SEQ ID NO: 255421 - RNA, 67 nt, Homo sapiens
aggaaaacaggaacagagcgagggaggagagagggagagccaaagaagaagagcaagaccaggccag

SEQ ID NO: 255422 - RNA, 73 nt, Homo sapiens
gccacgccaccgggcacggagcgaggcagagggacccccaaaggacacaaggaagaacaacccgaacgggccc

SEQ ID NO: 255423 - RNA, 82 nt, Homo sapiens
cgccgccacgacccccaggaggcccaacagcaggccgaggccgaggccggccccccaccaaagcaggagcgaggcccaccac

SEQ ID NO: 255424 - RNA, 82 nt, Homo sapiens
cccgggagcacgagagccaacggcacgggccaagcccgaagcagaggggcaccgaggcagcccagaggccgccgagaaccag

SEQ ID NO: 255425 - RNA, 78 nt, Homo sapiens
gaacaaagaaaagaaggacgagcagcgagagaaggacggaccgaacccaccggacacccccaggagaaaacacaacac

SEQ ID NO: 255426 - RNA, 71 nt, Homo sapiens
ggaggggaacgagaaaacaggaccaagaagaagaaccagcaaaaacacggccaaaagaagacccagacaag

SEQ ID NO: 255427 - RNA, 69 nt, Homo sapiens
caaacgcaaggggagagcgcaccgagccagcggcaccccggacccacagcagcggccaagacacaaggg

SEQ ID NO: 255428 - RNA, 69 nt, Homo sapiens
gccacggaaagagggagaagaaaacaaagccccgcagaaagcaacaaagcgagagcacaagaaaacagc

SEQ ID NO: 255429 - RNA, 77 nt, Homo sapiens
caaaggcccacacaggacagcgccggccacccaaagcacgggggcaacagaggccgccaaggccaacacaaccccga

SEQ ID NO: 255430 - RNA, 44 nt, Homo sapiens
aagggcaaacacaccggaggacagcagaccacagcccggcaggc

SEQ ID NO: 255431 - RNA, 78 nt, Homo sapiens
aacacggaacagaacaacccagaacggaagccccccggaaaagagagaagaacgagagccaaaggaccgcagacagga

SEQ ID NO: 255432 - RNA, 79 nt, Homo sapiens
acgcgacgggaccgagagaccgcgacacgggggccagaaggaaagcaaggaaccggcaaaggaacagacgaggaggaaa

SEQ ID NO: 255433 - RNA, 84 nt, Homo sapiens
gcgaaccgcagacagcggccaagaagacacaaaggacggaggcacggcccccgggcggggcgagcaagccccggaggaccgggg

SEQ ID NO: 255434 - RNA, 54 nt, Homo sapiens
caccgcgcaagagaggcggagaagaacccaaccaaaaccaggcggcaaccccgg

SEQ ID NO: 255435 - RNA, 82 nt, Homo sapiens
caccgggggggcaagcagaccccaggaccagacacggccggacaggagcgacaggacccaaacccgggccgcccggagcgcc

SEQ ID NO: 255436 - RNA, 78 nt, Homo sapiens
gcccgccacggcgccgagccgcggccgagaaacccaccagagaaggcgcggccacccaggacccgggggaggcagcga

SEQ ID NO: 255437 - RNA, 68 nt, Homo sapiens
gggacgcacagcaaacccacccagcacaccccgcgaaaggaggaggcacagaccagacgcagagacgg

SEQ ID NO: 255438 - RNA, 78 nt, Homo sapiens
cccgcccagccccggagagcgggaacagggaaaaaagcagacagacaacaaaaaagaccacaggccaagcgagagaga

SEQ ID NO: 255439 - RNA, 85 nt, Homo sapiens
gccgagcgcaccggccccacggcagacaggcgacagacagggccagccgccacccggacagagccacagaaagaagacacccgcc

SEQ ID NO: 255440 - RNA, 73 nt, Homo sapiens
aaggcggcaagagcgagcacaccaggaagaaagccacaagggaaaaaagagaaaagcagacagccaccagccc

SEQ ID NO: 255441 - RNA, 75 nt, Homo sapiens
gcccgccccccaaggaagcggcaaagccagaaagaggaggccagagcggggcccaaggagaccagccgcggccac

SEQ ID NO: 255442 - RNA, 75 nt, Homo sapiens
aacaagcggccacccgaaagcgaaagacccaggcagacaagccggaacacaggaaccggaagcgcacgaaccggc

SEQ ID NO: 255443 - RNA, 75 nt, Homo sapiens
gaacaggaaaaaggaagagcaacgacaggacacaaggacaccaagaaggagacaccggagcaagaaggaaacgag

SEQ ID NO: 255444 - RNA, 105 nt, Homo sapiens
cccgaccgcagcgcgcgcggcccacggcgggcgcgcccagagggcggagagaagaaggggcccagacgggaggcggaagcccagcaacgacccaaaggaaccagc

SEQ ID NO: 255445 - RNA, 83 nt, Homo sapiens
gccccggccggcggcggggcccgggcgagcagcccgccccggacgccacccggggacacggcaccaggcggccagcgcaagac

SEQ ID NO: 255446 - RNA, 74 nt, Homo sapiens
cccaagggcgcgccccccaccagacggagccccgaggagcaggaaaccaccaacgaagggggaacagaaaaggc

SEQ ID NO: 255447 - RNA, 87 nt, Homo sapiens
ggaagagccagcaaacccgccccgcggaggagcagcaggaaaggggaggagggacacccaccagaagaaaaaagggaaagacccagc

SEQ ID NO: 255448 - RNA, 75 nt, Homo sapiens
ccggcgcaggcccgcggggagcgcagcccggcggaggccggggcagcagaagaggacaagcagacagcaccaacg

SEQ ID NO: 255449 - RNA, 57 nt, Homo sapiens
acaggaggagcagcgaagaacaagaggacacaccagcacggaggaaagccccgaaac

SEQ ID NO: 255450 - RNA, 48 nt, Homo sapiens
cacgccggaagagaaggaacgggagaaacgggaaacgggaggacccac

SEQ ID NO: 255451 - RNA, 87 nt, Homo sapiens
gagagggaacgcagcgaaagcggaacggaggaagccagcccgagcaggcccaggggaggaggggcaaccacagacccgccaggaagc

SEQ ID NO: 255452 - RNA, 80 nt, Homo sapiens
cggccccgaccccgcggccggacgacccaagcccgcgagcaggagagggaacacgaggacccaaagaacaaacccggaga

SEQ ID NO: 255453 - RNA, 37 nt, Homo sapiens
gcacacccagaagcccaaccaggagagcaacaggggc

SEQ ID NO: 255454 - RNA, 41 nt, Homo sapiens
cccccgagggcgggaacaggaaggaaacgaggcaaaagaag

SEQ ID NO: 255455 - RNA, 68 nt, Homo sapiens
gaagagcaaccccagaaggcaacgcgccgcaaaacagaacgcgcgccaccccaagcaccggcacagca

SEQ ID NO: 255456 - RNA, 73 nt, Homo sapiens
gcccgcccagagcgcggaacgggaaaacgggggcaagagcagcaagagcgcagcaagaacaggagagggcacc

SEQ ID NO: 255457 - RNA, 84 nt, Homo sapiens
gcagacagcggccaagaagacacaaaggacggaggcacggacacaaggcacgaggacgaagaggaaaggggccacgaggaagac

SEQ ID NO: 255458 - RNA, 59 nt, Homo sapiens
agacacaagaagaggaggaaccagccgaacagcacaagcgccggaaagaaagacacgca

SEQ ID NO: 255459 - RNA, 78 nt, Homo sapiens
aaagccccacaggaagagaaggcggcgacaccgggagagcgaccagggacaaaagaggaacagaaaaagggccaaaaa

SEQ ID NO: 255460 - RNA, 76 nt, Homo sapiens
cgaagagggggacacgacccggagcacccgaccccgacggagaagaagaagacacggcacgaaaaacaccggcagc

SEQ ID NO: 255461 - RNA, 61 nt, Homo sapiens
cacgaggcaacacccgccgagcacaggcgaccggccacagccaggcggaggcaacgcggac

SEQ ID NO: 255462 - RNA, 74 nt, Homo sapiens
ccacagacccaggcaacgaagaacagggcaccgccgaggcagacccgaagccagaaacgcacccaaggcaaggg

SEQ ID NO: 255463 - RNA, 71 nt, Homo sapiens
cgaagagcaccgggagcggcgaagaggcaccggaggagaaggccgggacagcagaaaacagccagcagaaa

SEQ ID NO: 255464 - RNA, 55 nt, Homo sapiens
ggccggcccccccccagggccaggcgccgccagaacggccaaaagcacagcaagg

SEQ ID NO: 255465 - RNA, 86 nt, Homo sapiens
cccgagagcggaaacagacgccgacaccccaggccacgagccccaggccacggcagcaggcccagcccccagcgaagcagagccgc

SEQ ID NO: 255466 - RNA, 85 nt, Homo sapiens
gggacgggcagcagcgcgacccgagccggcgcccgggccggccaggacgacccgagcacgagggccagccgcacggacaggacga

SEQ ID NO: 255467 - RNA, 80 nt, Homo sapiens
cggcaagaggcgcagagcgaggagcgggaggcgcgagcggcgacgcaacaggggaagaacacaggcgaggacagagggag

SEQ ID NO: 255468 - RNA, 102 nt, Homo sapiens
gggggcacggcccgacaagaggcgaggaaggccgggggcgcccccccccccagcgccggccgcccgcaggacaccgagggcccagccgcgcaccagcgaccg

SEQ ID NO: 255469 - RNA, 52 nt, Homo sapiens
aagcaaggaacaagggcaagaaagcaaggcaaaccagggggccacacagagc

SEQ ID NO: 255470 - RNA, 63 nt, Homo sapiens
agcaccacagcccgcagccccgccagccacccccagccagggaccgacccagccccccagcag

SEQ ID NO: 255471 - RNA, 76 nt, Homo sapiens
agcagggggcggccacaggacgcggagagcaacgggacccggccgcccagagccacggcccaccagcccggccggg

SEQ ID NO: 255472 - RNA, 72 nt, Homo sapiens
aagggaaggggaaggagaccacaaagaaggccggcccacagcccaaaaagaaacaggaccgaaagccagagc

SEQ ID NO: 255473 - RNA, 75 nt, Homo sapiens
ggcccagcaaagcaacagccaagccagagccgggccccaacaacccgggaacagcagaagcaggaaggagagacc

SEQ ID NO: 255474 - RNA, 67 nt, Homo sapiens
cacaggaaggagcccggcagcgccgggaaacaccggcgggcgaagaagaagaaggaaagagaaaaaa

SEQ ID NO: 255475 - RNA, 74 nt, Homo sapiens
gaaggcgcgcaccggaagcaccagcgaggaagcgggacccccgccccggccccccagcgaggaagaagagcaaa

SEQ ID NO: 255476 - RNA, 97 nt, Homo sapiens
cggcgccagggcaagccacacggggggcccaacgaggcgcggggcaggaggggcagcagcaggacagggaacccgggagacagcaacagacggagga

SEQ ID NO: 255477 - RNA, 87 nt, Homo sapiens
ccaaagacaagacgcaggagaaaacgagacccaagaacacccaaggaggcaggaacagaaaacggcagcgaggaacacggagccccg

SEQ ID NO: 255478 - RNA, 78 nt, Homo sapiens
cagcccgaggccccagccagcgaacgggagggcgaaacccagcaggcgcacacacaggaccgaggagagaaacccaac

SEQ ID NO: 255479 - RNA, 106 nt, Homo sapiens
gagggcggcggaagcggagaccagccgagcggcggcccggggcagcccggcgggcgaagcgcacaccacaacagcacaggcgacagaaaccaagcggaagaggcgg

SEQ ID NO: 255480 - RNA, 73 nt, Homo sapiens
cacccaccccacaggcccggccggcgcgaacagaaaagccagaccaaagcaaacaacggaaagcgggcagagg

SEQ ID NO: 255481 - RNA, 38 nt, Homo sapiens
ggagaacacagaaaccggccccaggcccgaccacgaag

SEQ ID NO: 255482 - RNA, 81 nt, Homo sapiens
ggggaagacgcccgcacccagagaggcgggcaggcccaagaagacaggcaaggagggggcggaggcgacaggaagaagacg

SEQ ID NO: 255483 - RNA, 73 nt, Homo sapiens
cgaccaggaagaggaacaggaagaacgccagagaaaaaggcgcagcacagagaaaccaaggaaagcagaggcc

SEQ ID NO: 255484 - RNA, 60 nt, Homo sapiens
acagcccacccaacaagacaccggacaagacacgagagccacggcgaacacgagagcaca

SEQ ID NO: 255485 - RNA, 79 nt, Homo sapiens
cgccccgccgaagagccaaaaagaccaagcccggaaaagacccagagccggaccccggaggggcccccccgcccagggg

SEQ ID NO: 255486 - RNA, 80 nt, Homo sapiens
cagcggaggccgccgcgccccaaagcccagccgagcgcgccgagacccccagggcggccgggggcacgcaaagaaacacc

SEQ ID NO: 255487 - RNA, 41 nt, Homo sapiens
gagcccgcaccgggccggcagcagagcagccagagaagaag

SEQ ID NO: 255488 - RNA, 81 nt, Homo sapiens
agcggccaaacccacccggcccccggcgccgccagcgaggcacaggcgaaaacaggccaaaagaaagccgagaaggaacga

SEQ ID NO: 255489 - RNA, 77 nt, Homo sapiens
ccgagacaccagcccgaaacaccaccaaggacaaccaagagacgggaaagaggcaaaaccgccgacgggaccacggg

SEQ ID NO: 255490 - RNA, 73 nt, Homo sapiens
caccaccaggcgggagcaaaacggacagacgggacacaaaaaagaccgccgcggagcgggaacagagccccca

SEQ ID NO: 255491 - RNA, 57 nt, Homo sapiens
cggcacacaagacaacgaaagacgggggccacaggccaagcgaccgaacccggccaa

SEQ ID NO: 255492 - RNA, 84 nt, Homo sapiens
ggaagaaacgagaaggcacggcaggcagggcagacaggaggacgcgagggcccggggacagaggcaccacccagggaagcaggg

SEQ ID NO: 255493 - RNA, 84 nt, Homo sapiens
ccagcgcaccaacggcgaccggaccggcacggacggccgcccgagcggcaggagaaggcggaggggccgaggggaccaagcgga

SEQ ID NO: 255494 - RNA, 53 nt, Homo sapiens
gagacggaggaggaggagaagaagagagaaacacagacgggaagacggggaga

SEQ ID NO: 255495 - RNA, 76 nt, Homo sapiens
aaggagcgagcccccagaagaggaaggcccccgcgggcgcacacaggaaggcggagggaagaagggaaaacggaga

SEQ ID NO: 255496 - RNA, 83 nt, Homo sapiens
gaaggaaagcgaaggggaaggcgccgaagaggacgaaggagcgacagagaagaaaccaaacgagggagccacaggcaaaggag

SEQ ID NO: 255497 - RNA, 63 nt, Homo sapiens
cccggacagacccccgccccgaggacggacaaggagcgggaaacacccggcgaagccgaagga

SEQ ID NO: 255498 - RNA, 71 nt, Homo sapiens
agaggagcccaccggaggggaccaggcgaggggcccggccgcggggcacagcagagggagcggcagaaaaa

SEQ ID NO: 255499 - RNA, 57 nt, Homo sapiens
cgggcggagccggacgagcgcgggagcggcagcccacaagcaggaagaccagcccca

SEQ ID NO: 255500 - RNA, 60 nt, Homo sapiens
gcgcacaaacccaaccaggaaagcccggggggcccgcgggaccagcccggccggggccca

SEQ ID NO: 255501 - RNA, 86 nt, Homo sapiens
agagccgcagcccgagcccagaaggcggcgaccgggcgcgggcaaggcgggaaagcacagggcagagacacggaaggaggggaggg

SEQ ID NO: 255502 - RNA, 79 nt, Homo sapiens
ggcgcccgcacggacccccacacaggaccacagggacgcagaggagaggaaccaagcaacgaccaaagcagcaggaggc

SEQ ID NO: 255503 - RNA, 74 nt, Homo sapiens
cagggcagcaacacgagagaacggaggccggcagacggaacacgcgaacacgcaaaaggaagcggcaggcacgg

SEQ ID NO: 255504 - RNA, 82 nt, Homo sapiens
gccggcgggaacgaacagccgacggggcgaccgccggcccaggggaccaggagagaagacgaaaaagaagaagcagcgaaca

SEQ ID NO: 255505 - RNA, 80 nt, Homo sapiens
aaacagacgcccagccaaacaaaaaggaaaggagacaagcagagacgaaccaggcaaagcaaggcgccaccggaagaaac

SEQ ID NO: 255506 - RNA, 53 nt, Homo sapiens
ccagaaagcagcagcagaaaacgaaggaagaggagggggggccgcccgcccaa

SEQ ID NO: 255507 - RNA, 71 nt, Homo sapiens
agggagcccgacaacacagggcagcaacacccccagggagcgggggcggaaacacggaagagggggaggcc

SEQ ID NO: 255508 - RNA, 72 nt, Homo sapiens
ccaaggcccccggccggccccgcccccggccgagcgacggaagcgggacgaccaggacacaccacgaggagg

SEQ ID NO: 255509 - RNA, 96 nt, Homo sapiens
gcccgaggaaagagccggggcgcgcccagaccaggccaccggcgccgggagggaggaagaggcgcggcaagggcgcggcaagaaaaccggggccgc

SEQ ID NO: 255510 - RNA, 72 nt, Homo sapiens
ccagccgcgcccgggagagcaagagaagggccacgccgcccccagaaccccgacccaaccaacagaagcacc

SEQ ID NO: 255511 - RNA, 73 nt, Homo sapiens
gagagcccgcgacaaagcaggcagacgcaaggcagaaaagcccagaagaacaggcggcgggcagagcgaggca

SEQ ID NO: 255512 - RNA, 59 nt, Homo sapiens
cccaagcagcaagaaaaggggccgggcacggaccccaaacgggacaaacggccgaaacg

SEQ ID NO: 255513 - RNA, 69 nt, Homo sapiens
gcgcaaggcagcccgcaacgcaccagacagaagcaggaaaggaacaccaaggaaagcaaaggcagcacc

SEQ ID NO: 255514 - RNA, 80 nt, Homo sapiens
accagagcggaggacagaagagaagaccgccccaagaggaaaccagaaggaggggaccgggccccgaaggagggacaggc

SEQ ID NO: 255515 - RNA, 61 nt, Homo sapiens
ccacaggggggggggccgcagcaagaagcaggaagggcacccagagacgcggcaacccacg

SEQ ID NO: 255516 - RNA, 70 nt, Homo sapiens
aagccgcgccggagcggagcgcgggcgccggggagccagcgacgaagaagagaacaggaaggcggagcga

SEQ ID NO: 255517 - RNA, 84 nt, Homo sapiens
gagggcacggagcaaccccaagcaccacaaaaaccacgagagcccgcccaacaaacagaggacagggagaagagagcggaccca

SEQ ID NO: 255518 - RNA, 67 nt, Homo sapiens
ccagaggccgcccccgcaaggcacacagagaaaaaaagggaacaaaacacagcaagcagacaaaagg

SEQ ID NO: 255519 - RNA, 65 nt, Homo sapiens
aggaaacggcagcagaacacaaggcgaccagccagcccgggagacagagggagccagcagacgcg

SEQ ID NO: 255520 - RNA, 77 nt, Homo sapiens
gcacccagccgcagcgccagcagcggacaggcacagacaaccagaaacggcgaggaaagagaggagccccggaaaga

SEQ ID NO: 255521 - RNA, 75 nt, Homo sapiens
aggacacgggggccacaaagccccccggagacgcaaccaagagccaacggaccccagccaaaacccggaagaaga

SEQ ID NO: 255522 - RNA, 73 nt, Homo sapiens
gaacggcgggggggacaccggggcgcgggggacgggagcggcagccccggaaagggagcaacaagaaaaagca

SEQ ID NO: 255523 - RNA, 67 nt, Homo sapiens
gacccgcaccagccgggcaccaccagcacgcagcagggcaggacgccccgcgacccgggagcgcaca

SEQ ID NO: 255524 - RNA, 81 nt, Homo sapiens
gggcaccggacaagcggaggcaggaagaccaccgcaaccccgcccccgccaggagagagagaaagggaacgggacaagcag

SEQ ID NO: 255525 - RNA, 73 nt, Homo sapiens
aaccacccacgacaccagcaacgcccaggagcaagacaggggagaaaacaagcacgggggccaaggagacacc

SEQ ID NO: 255526 - RNA, 84 nt, Homo sapiens
aagaaggaagaaccacgaagaaacaccacaaaccggcaccccaaaaagggaaagaagcggaaggcacaaagggaagaggaacag

SEQ ID NO: 255527 - RNA, 73 nt, Homo sapiens
ggcgccgccacccccccccagcaggaaaccagaaccgcacagcaagccccgggggaaaagagcgcccgcgcca

SEQ ID NO: 255528 - RNA, 74 nt, Homo sapiens
gagccccccccgagaaacgagacagagcaaaaggggacagaggacgcagaaaacaaccacccccaggaccaacg

SEQ ID NO: 255529 - RNA, 76 nt, Homo sapiens
cagggcgcccccgagcacaaagcaaggaggagaggcagcacaagcagaagccgggccggcagcagccaacagccca

SEQ ID NO: 255530 - RNA, 91 nt, Homo sapiens
cacggagaacaacgccaccaagaagcaagagcggagcagcagccgcgcagacaaggcaggaaccgacgcccagggcacgcccccccaagag

SEQ ID NO: 255531 - RNA, 71 nt, Homo sapiens
gagccgggacacgaagaagggacggggacccccaacgggcccgcagaacggccgagcgaccaggagaggag

SEQ ID NO: 255532 - RNA, 65 nt, Homo sapiens
gacaaaagggccaaagaagggagaccagcaggcagaacacaggcgggcgagaaaaaggggcaacc

SEQ ID NO: 255533 - RNA, 31 nt, Homo sapiens
ggcggaaggagaaaagcacaggccccagaca

SEQ ID NO: 255534 - RNA, 78 nt, Homo sapiens
cagaaaaggccaaagggacaaagagaccagcggagcccacaagggagagaaccacacgaaacagccaccagaaaaaca

SEQ ID NO: 255535 - RNA, 69 nt, Homo sapiens
cggcgcccggacgcgaggggggagggagacggacggaacgcggcgcgaccagaaaaccgagaaagccga

SEQ ID NO: 255536 - RNA, 55 nt, Homo sapiens
gcacccaagggcgggagaaccaggaagccgacgcagccagagcagaaagaaggga

SEQ ID NO: 255537 - RNA, 74 nt, Homo sapiens
gcacccggggaacccagacgcccggggcagcccccccagacggccaacacaggcaggaagagaaggcggggcgc

SEQ ID NO: 255538 - RNA, 83 nt, Homo sapiens
gacgccggcggagacgcgggcgagacaagccgagaccaccaggagcagagcggaggcaaccagccaaaacaacggaaaacagc

SEQ ID NO: 255539 - RNA, 80 nt, Homo sapiens
acgcccccggggaaggcgccagcgaagaagaaagaccacagcaagaccacgcccccagccgggggaccaggccgaacgac

SEQ ID NO: 255540 - RNA, 56 nt, Homo sapiens
cgcaggccagaccccgggagcccagccaccacagacagacaaagacacagcccccc

SEQ ID NO: 255541 - RNA, 37 nt, Homo sapiens
cggccccccagcaacccgggacaagaacccaagaaac

SEQ ID NO: 255542 - RNA, 80 nt, Homo sapiens
ggaggagcgcgcccgccgagaaggagcccccgcaggcgcacggaagaccaggagagagagggacgcagacacgacaagca

SEQ ID NO: 255543 - RNA, 77 nt, Homo sapiens
aacccgaaccacggacaggacccgcccagcccaacggggagcacacggacccgacaccggcgccagcgcaagaaacg

SEQ ID NO: 255544 - RNA, 75 nt, Homo sapiens
cagacgacacaacccgggcgcggggaaggagggcgaaacaaaggaccagcacgggaaccggccgcccagcgcagc

SEQ ID NO: 255545 - RNA, 63 nt, Homo sapiens
gacagaccaagaaggcggcaaagaacagggccgagaagaagcggggacggcaaaacagccaac

SEQ ID NO: 255546 - RNA, 68 nt, Homo sapiens
gcgcagccgcagccgacccagcccggagcagcagccgcgcagagaaagcgcaggaaggaaagggacaa

SEQ ID NO: 255547 - RNA, 65 nt, Homo sapiens
gccggaacaagagacccgcaaaagcggcaggcgacagaggcggcccaggacggacccggcacgac

SEQ ID NO: 255548 - RNA, 73 nt, Homo sapiens
gccgcccggagaaacggagcaccgagaacgcagaagaggagaccgaacagccaagagccgccgggggggaacc

SEQ ID NO: 255549 - RNA, 82 nt, Homo sapiens
gcggcgcgggaggccggcgggggcagagagcaggcgagcgagagcaacgagcgccgcacagggcccggagccaaggaagccc

SEQ ID NO: 255550 - RNA, 71 nt, Homo sapiens
agaggacaagagcgcaaggagaacaaaacagggaccaaagaacccaccgccccgaggaaacgagaagccca

SEQ ID NO: 255551 - RNA, 68 nt, Homo sapiens
ggccccagacgcacaggaaccaaccacagccccaggggcagagcccgagaaaccgacgagccgagaga

SEQ ID NO: 255552 - RNA, 76 nt, Homo sapiens
agcacagacagacaagaggcagccaggcagaccacagggggcccacgagaagagcaggcgacgggggagagggaga

SEQ ID NO: 255553 - RNA, 81 nt, Homo sapiens
aggccgcaggacgggagcgcgccccgggacacgggggcagggcgcagagcgcagaagcgcgccaggacaccgccagaagcc

SEQ ID NO: 255554 - RNA, 75 nt, Homo sapiens
ggaggcacggaggggcgccggagccaggcggccaaggcagggggcacaagccacggagcgagcccggggagccag

SEQ ID NO: 255555 - RNA, 78 nt, Homo sapiens
gcggcgagaggaggccgccagcagaggcggagcccgcagaccgcagaaggccggagacaccagcaggacgaagaaagg

SEQ ID NO: 255556 - RNA, 69 nt, Homo sapiens
cggaggcgacgcgcccagaagcacaacacgaaaggagaagaggacgggaggagaaaagccgaagaagag

SEQ ID NO: 255557 - RNA, 81 nt, Homo sapiens
cccaggcagccccgcacgagcggcaaccgaaagccagcagcgggccgagaaacagacaacccacagaacaaagcggaccaa

SEQ ID NO: 255558 - RNA, 77 nt, Homo sapiens
ggaaacgacacagaaaccaaccgacgcagcacaagaacgcagacccccagaacaagaccgaaacaaggaccccccgg

SEQ ID NO: 255559 - RNA, 62 nt, Homo sapiens
gccagggcccgaagagggaagacacgcggaaacagggaagcagagccccgggccgggaaggg

SEQ ID NO: 255560 - RNA, 73 nt, Homo sapiens
gaaacaaggagggaacagggcgcacccccgagagagccacggaagggcgccaaggagccaccgccaccacggc

SEQ ID NO: 255561 - RNA, 86 nt, Homo sapiens
cgaggaagaggaggacgaccggcggaagagacaccaaagggaccaaccaacaccaaaccccgacagcccgcagaaagagaccaaac

SEQ ID NO: 255562 - RNA, 66 nt, Homo sapiens
ggaaacccacaggaggcaaccacacagagagccccccccagcgccgaaggcccgacccagcagccc

SEQ ID NO: 255563 - RNA, 83 nt, Homo sapiens
gggccggacacacgggcagccacccggcggcggggccgcagcccaaggaaggggcgggaggaacagagcgacaggcaaacacc

SEQ ID NO: 255564 - RNA, 61 nt, Homo sapiens
cgaagacagcgccccagcagccaccaaggcagcagaccgggcccgaggaacaggaggaaac

SEQ ID NO: 255565 - RNA, 48 nt, Homo sapiens
aaagaaaagaagggcccaacacccacaggaggagagggggccgagaaa

SEQ ID NO: 255566 - RNA, 72 nt, Homo sapiens
agggcgaagggaacgcaaggcccccgaccacacgcccgcgcgaggcagagcggcaacgggagaaggaaccac

SEQ ID NO: 255567 - RNA, 82 nt, Homo sapiens
acacggaaaacgcacagagaaccacaggaccgacccaacgaacagccccaggagaggagaaggcagggaaagggcgcgcagc

SEQ ID NO: 255568 - RNA, 74 nt, Homo sapiens
cggcgagcagagaaaccagcaaaccgacaccagcgacacaagcgcgagggaaccacagaggacaggcgaggggg

SEQ ID NO: 255569 - RNA, 71 nt, Homo sapiens
cacccagcacaacaaaccccgcgccccagaagggaaggcaggcacgagaggccccagaaacacaaccccaa

SEQ ID NO: 255570 - RNA, 48 nt, Homo sapiens
gcaccccccgccggaaagcggacccccgagggccaccaacaagcccag

SEQ ID NO: 255571 - RNA, 89 nt, Homo sapiens
accggcgacagcagccaggagcagagcgacagcggcgagcagaacacggcgagcggccccgacaggggccccaccagccaacacccccc

SEQ ID NO: 255572 - RNA, 71 nt, Homo sapiens
accgcaaaaagcggcccgggagcccgcgcccccccggggacgaggggagagccgcaagaaagaaacaggaa

SEQ ID NO: 255573 - RNA, 78 nt, Homo sapiens
gaacacgacagaaagaaaggccaaagcagcaggccccgagccccggccccaaagacccaaaacagagacaccccccag

SEQ ID NO: 255574 - RNA, 57 nt, Homo sapiens
gcccacgcaaacccaaagaccccgccggagacgagagcccgaagggccgaggacaag

SEQ ID NO: 255575 - RNA, 73 nt, Homo sapiens
aagaaaagaaggcacccagcgcaaaaaagcagaacagaacaggagcaggaaaaaacccagaaacaacaaaaaa

SEQ ID NO: 255576 - RNA, 78 nt, Homo sapiens
caaaaccggacccggaacaggccaaaagcaacggcaaccggcacgcaccagagcagcccacaggacggcacccgcccc

SEQ ID NO: 255577 - RNA, 72 nt, Homo sapiens
cggaaagcagccccgcaggagaagcgaaaagaaacccaagaagcccgaggagcccaacaccggacagggcag

SEQ ID NO: 255578 - RNA, 80 nt, Homo sapiens
ccgagcacgccacccccacccgcacaggaccaaggggagccgccaccaaaagcagacggaaaacccacggggaagaccac

SEQ ID NO: 255579 - RNA, 73 nt, Homo sapiens
acccggggacaagcgcgggaacggcgcggaagcagaaagagaaggcagaacagaggaagaccagaaacccaga

SEQ ID NO: 255580 - RNA, 76 nt, Homo sapiens
cacccaggagacgccgcgggacagcaaagacaagaggagacaggggagagccaccgacccaagagccaccccaaac

SEQ ID NO: 255581 - RNA, 77 nt, Homo sapiens
caaggaaaaacggagagccacaaaaaaggaagcgaaagcaaacgaacacgcgcagcgcagaggcccggcagccccaa

SEQ ID NO: 255582 - RNA, 80 nt, Homo sapiens
gccgcgccaagcgagaacgcggccgccgggaacggggacagaacaaacgggaaacaggaaccaagccagaaaggaaaggg

SEQ ID NO: 255583 - RNA, 80 nt, Homo sapiens
aagaggaccggcagggcagagcaggaggccccccgagggcggaccgagagggcggaccacccaggaggagggggccagcg

SEQ ID NO: 255584 - RNA, 76 nt, Homo sapiens
ggaccagccggccggcccgccaaggagaacggacaccgcaacccggacgccccggccgcgcccccgcccagaaggg

SEQ ID NO: 255585 - RNA, 83 nt, Homo sapiens
aaagccaaagccacagaaaaccagggaagcaggagaagcagcaaacgccgagcaggcaaggacggggacacaagaccagccag

SEQ ID NO: 255586 - RNA, 62 nt, Homo sapiens
ccagccagcaggccgggcggggcacaaggcggccgaccaagggaccagcgcagcacccgaac

SEQ ID NO: 255587 - RNA, 66 nt, Homo sapiens
cacgggaccaacaagagcagccccagcgcccacaccgccagccacacaaagaagccccagcaagac

SEQ ID NO: 255588 - RNA, 70 nt, Homo sapiens
ccagcagaggcggaaggacccggaagccacaaagcaaaacggcacgggagagggcaacaacggcggagac

SEQ ID NO: 255589 - RNA, 80 nt, Homo sapiens
agccaacaaacaagaccaaggcaagaagagaaaagaccgccggagaaaagacaagcagaccggaagaccgacggaagacc

SEQ ID NO: 255590 - RNA, 80 nt, Homo sapiens
aaacgcgaaaaaacgagccaagaaaggacgccccccaggcccgcccccccaagaggaaaacacaggagaggaaggaaggc

SEQ ID NO: 255591 - RNA, 88 nt, Homo sapiens
caacaccagcacgcgagcggccacacggaggcagggagaaacggcccgacccccacagaggaccgagggaacagccaggagagcaagc

SEQ ID NO: 255592 - RNA, 74 nt, Homo sapiens
cagagaaagaagaccaaaaccaaagacaaaagaaaacaaagcaacaaggcagaagaagaacccagccggaaaac

SEQ ID NO: 255593 - RNA, 65 nt, Homo sapiens
gcacgcccaggacaacgccgaaggaaaagcacgcccaggccaaaggccgccccccccacacacca

SEQ ID NO: 255594 - RNA, 83 nt, Homo sapiens
aggcaagagagagaccacccggccaacaggacaacaggaaacagaagagaagaaaaaacagacagcagacaaagagaggaacg

SEQ ID NO: 255595 - RNA, 84 nt, Homo sapiens
agaccggaccgagagcggaccgagagcgcgaaacgcacgagaagagaggcgccagccgagagcaccaccgaccgggaagagggg

SEQ ID NO: 255596 - RNA, 70 nt, Homo sapiens
gaccaagaaccagcaaagacagaaagcccggaggaagagaagccgggccgcaggcggaaaccaaagggag

SEQ ID NO: 255597 - RNA, 52 nt, Homo sapiens
agagcaagcgggggaccgaacaaggcaaaagggaaccaaaaacgcagaaaac

SEQ ID NO: 255598 - RNA, 53 nt, Homo sapiens
ggacggcgggcgagggaggggaccgccgcgaaaaaaccagaggaggagaagag

SEQ ID NO: 255599 - RNA, 78 nt, Homo sapiens
gcggggcccagggagaaaggcccaccggccgggagggcccagggcggggcccgagaacgggcccagaaaggaagcgcc

SEQ ID NO: 255600 - RNA, 62 nt, Homo sapiens
gaggggcgccgcgggacgcagaggagagggcacgacccagccgaaaaaggaagagccacccc

SEQ ID NO: 255601 - RNA, 77 nt, Homo sapiens
accccgccaggccgcccggcgcgagggggaccagcgaccaaggaaaagcggccaggaccaccaggcggccacgggcc

SEQ ID NO: 255602 - RNA, 81 nt, Homo sapiens
ccgccccggacccgagcagagaaaggagacacggcgcgccgcagcagggggaagaagagaaaacgaggacccaagaagcag

SEQ ID NO: 255603 - RNA, 65 nt, Homo sapiens
gagagcaaccgacacagaagcacggagcccaagcgcacaagaacgaagaagaaacaaagcccaaa

SEQ ID NO: 255604 - RNA, 84 nt, Homo sapiens
ccgccgggcgcagggcccccaaaaagcgccccgccgcgagcacgcacaccaagagacaaccggagccagccccggccaggagcc

SEQ ID NO: 255605 - RNA, 97 nt, Homo sapiens
aaagccgaggaaaagagaaagacagcaacaacaaccagcagcaacaaggaaacagggcgacgccaggagcacaccgaaaagaaaggaaaaccgggag

SEQ ID NO: 255606 - RNA, 70 nt, Homo sapiens
aaagggacaaagagaggagcagacgaagagagaaaggcagggcaccccaccacagcgacaaagacccgga

SEQ ID NO: 255607 - RNA, 72 nt, Homo sapiens
ccgcgcgccccgcccagccggcgcggcggcacgacggcacgagcccgggcggacaggggaaacacagggggc

SEQ ID NO: 255608 - RNA, 78 nt, Homo sapiens
gcggggaccgcggcccggcaccggacgaagaaagaaccacagaaaacaacagagacaaacgccaccacagacaccgca

SEQ ID NO: 255609 - RNA, 84 nt, Homo sapiens
aggcccaaaccacagcaagggacaggaaggaacacacggagcaggaagggaccacagaccagcacgccggcgccacgaaccgag

SEQ ID NO: 255610 - RNA, 60 nt, Homo sapiens
acaagacccaaaaaggcgacgcaaccaagcaccgaaacagcaggacaaagggagcacagg

SEQ ID NO: 255611 - RNA, 62 nt, Homo sapiens
gagaaggaccaagaaccaggcaaccagagaagccgaacgccagcaagaagccgaaacaaaac

SEQ ID NO: 255612 - RNA, 76 nt, Homo sapiens
ccacggggggccggggcaccagagagaaggcagcggggagcagagagcgggacaaaacacccaagcacacaaccag

SEQ ID NO: 255613 - RNA, 72 nt, Homo sapiens
ggaaccaggggggcaccaccccaacggacacacggccacgggaagaagagaaaaagccacgcaaaacggagg

SEQ ID NO: 255614 - RNA, 89 nt, Homo sapiens
ggccaaaacgcacagggaaggcacccagaaacgagaagccaaagaaccagacaacagagcccagccaaaccgaaggcccaaaaagcaga

SEQ ID NO: 255615 - RNA, 69 nt, Homo sapiens
agagacagcgacggcaaaagcgcaaccagggaggccgcagacaggaagagagcccccgccgagaaaaga

SEQ ID NO: 255616 - RNA, 77 nt, Homo sapiens
gaggacagaaaacgcaagacaacaggagaggaaagcggaaagccaagcccaaagggcacagaacagagagacgaacg

SEQ ID NO: 255617 - RNA, 80 nt, Homo sapiens
ggaggacgaggagagccggcggcgggaggccaaggggccccagacacgacgcccccggccggcccgggccgcgccagagc

SEQ ID NO: 255618 - RNA, 56 nt, Homo sapiens
acaacccgacccgacgagacggacacaagcccacacgccagccaggaagaaggacc

SEQ ID NO: 255619 - RNA, 80 nt, Homo sapiens
acaacgagggagaagcacaagacagcacagaggaccagcagcaggggccaggacagggcaaagggagcccagaccacggg

SEQ ID NO: 255620 - RNA, 50 nt, Homo sapiens
ccggggggccccagccccgagccggcgaacaagacgacaagcccgacacc

SEQ ID NO: 255621 - RNA, 58 nt, Homo sapiens
ggggaggcaaagggaggaggaggaccggaggggccgaaggggacagaaggagacggaa

SEQ ID NO: 255622 - RNA, 73 nt, Homo sapiens
cgaccaacagcagaggggaagcaaccggcccggaaaaaagagccaaaaggcagcaaaggcgagcaaaacaaga

SEQ ID NO: 255623 - RNA, 53 nt, Homo sapiens
ggcagaaagaacagccgcgacacaaaggacggccagcagaagcaggcgagccc

SEQ ID NO: 255624 - RNA, 70 nt, Homo sapiens
gccgcgagacgcggcgcgcgcggcaccaggccggcagcagcaaagccaacagaacaaacaaggggacgga

SEQ ID NO: 255625 - RNA, 59 nt, Homo sapiens
aaggccgggagaccgcggaggaaggggccccgaacaccggccccagcagccgagcggaa

SEQ ID NO: 255626 - RNA, 66 nt, Homo sapiens
agacacgaaagcaagacgaagacaacaacggaaagaccagaaggccgcggacccccccccccccac

SEQ ID NO: 255627 - RNA, 68 nt, Homo sapiens
aaaagacgcccacacggaggcacccaagacagaggaaggaaaggaggacaaaacacagcaaggcagcc

SEQ ID NO: 255628 - RNA, 77 nt, Homo sapiens
caaaggcaacagcaggacacgcacgccagaacacaaagccaaggccgccgaggcggaggcaaggcaagaccggccac

SEQ ID NO: 255629 - RNA, 80 nt, Homo sapiens
agcgccacagaagaaccaccaagaaaacgcggacaaaggaaaaagaggaggaaaacagcagggacgaacaaaagcgagag

SEQ ID NO: 255630 - RNA, 57 nt, Homo sapiens
cagagcaaggaggccccagcggaccgaacaggcacagcaaggcggggcgggcacaga

SEQ ID NO: 255631 - RNA, 75 nt, Homo sapiens
cgcgcgaaagcaaccagaaaagagacccggcagacaagacgccggcaagagaaccagccccaagcacgggaagac

SEQ ID NO: 255632 - RNA, 72 nt, Homo sapiens
gacgacagaccagaccaagcaacagagccgaggagaagaacacaggacgaaagccacgggaccacaaagggc

SEQ ID NO: 255633 - RNA, 57 nt, Homo sapiens
gcccccaggcagcagaccaagggaggaccgcgcacaaagccaaagcgaggccaggaa

SEQ ID NO: 255634 - RNA, 63 nt, Homo sapiens
ccgcagcggcaaggagagacgcgcgaggggcgccgaagcgagggaaggcgaccgagaacacag

SEQ ID NO: 255635 - RNA, 62 nt, Homo sapiens
ggagcagagggaggcgcagacgggagccgggagccggcagggcggagaacggaaaagcacca

SEQ ID NO: 255636 - RNA, 67 nt, Homo sapiens
acaaagcgaaacaaaacgcacggaaagacccagaaagccaagacaaaagaagaggcgaaagaagagg

SEQ ID NO: 255637 - RNA, 82 nt, Homo sapiens
accccgcgagcacggacaaaggacggcaaggcgcgccaagacagagcgggagccaccagcgccaaagggaagccaggagccc

SEQ ID NO: 255638 - RNA, 74 nt, Homo sapiens
caagcacgcacgaggaccaggggccgaagcccagcagccaaagccccgcagccagaggagaaacacgccaccac

SEQ ID NO: 255639 - RNA, 75 nt, Homo sapiens
acacgcagcggcggccagggaccagaagcagcaggacgaagcacgcagagaagccgagacaaaaaggcaaacccc

SEQ ID NO: 255640 - RNA, 58 nt, Homo sapiens
ggaacgccggcccgagaaagcccgccagcagcgcaagccccggggcagagacacagga

SEQ ID NO: 255641 - RNA, 71 nt, Homo sapiens
cgaagggcgagcgacaaccgagcacaaaaaaggcacccggagaacagacagaccagccgaacccagaagcc

SEQ ID NO: 255642 - RNA, 70 nt, Homo sapiens
ggagcagggagaggagcgggaaacgggagggaaccagcaacaagccgcgagcaggcgacccaaaagagcg

SEQ ID NO: 255643 - RNA, 73 nt, Homo sapiens
cggacccagccccagaacgagaaacaacaccaggaagaagcaggacacccgccagccaacaacaaaccaacaa

SEQ ID NO: 255644 - RNA, 79 nt, Homo sapiens
agcggccgagcaggcgagcgaacgacgggcgccggccgagcccgggaaaacgacagcagcagcagggccggaagacgcc

SEQ ID NO: 255645 - RNA, 75 nt, Homo sapiens
acacacagcagagccacgggacccacaccgcggaaaggaggcagggacagcagggacagccgggagagcaggaga

SEQ ID NO: 255646 - RNA, 65 nt, Homo sapiens
gaagcaaaaggcacacgaaagggagagaagaagagcccccaagcaccacggagggggagagcacg

SEQ ID NO: 255647 - RNA, 78 nt, Homo sapiens
aggacgggacgggagaagaccacccccaccaagggggaggaaacccaaagccaggccacacaagccccagccaaaacc

SEQ ID NO: 255648 - RNA, 79 nt, Homo sapiens
cgcggggcggggcggcggagcgagcaggcacaaagccaggaagcaaggggaggaaaacacccgagaggccagaccggaa

SEQ ID NO: 255649 - RNA, 80 nt, Homo sapiens
cgaaaaagaagccgcagagacagaaagagagaggaaggagaaaagaggaaaagaggcaaacggaaagcacccaagcgcag

SEQ ID NO: 255650 - RNA, 51 nt, Homo sapiens
gcccgcccgagaacaccaggagacacaagggcggaggcccggagcgggcgg

SEQ ID NO: 255651 - RNA, 76 nt, Homo sapiens
caaagcgagagagggaagcgcccggccggaggcaggggaaagaaagaagccggcgccccaacccaccggagccccc

SEQ ID NO: 255652 - RNA, 68 nt, Homo sapiens
aacagaagagccccacagagcccccagagcccaaggagggccaaaaccaggcgagaaccaggagaagc

SEQ ID NO: 255653 - RNA, 69 nt, Homo sapiens
aacagccacggaagaaagcagcaaaaccggaaaccaccggaagaaaaacagcgagcaggagcagccacg

SEQ ID NO: 255654 - RNA, 82 nt, Homo sapiens
gacccccgcgacccccacacagcgagagagggaggcccacagccagccagaacaaccacaacccacaaccaaccaaccacaa

SEQ ID NO: 255655 - RNA, 75 nt, Homo sapiens
aacagcccgccgggacacaccccaggaaaaagacagcccgcagcacgaccagcaggaacgcccaaaagagcggga

SEQ ID NO: 255656 - RNA, 79 nt, Homo sapiens
cgggcgcggcacggccaacggggccgcccgacgacgaaaccccccaggcaagaggcgcaggaccgggaagaccaacaaa

SEQ ID NO: 255657 - RNA, 80 nt, Homo sapiens
cgggaccaggcgaagcggccgagcaggcgagcgaacgacgagggccacgccaaggcgacaagcaaacgaggaggaagcgc

SEQ ID NO: 255658 - RNA, 62 nt, Homo sapiens
cacggccacggccagaggaccccaacaccagagcagagcggggaaccgaacagaaagacagc

SEQ ID NO: 255659 - RNA, 38 nt, Homo sapiens
ggcgggcggcggccccggcaggacccaaagacaggacc

SEQ ID NO: 255660 - RNA, 76 nt, Homo sapiens
agaggggcgagaacgcccagcagaaagcgccccagaggaaagggaacgacaccaaaacacacaacccaagacccaa

SEQ ID NO: 255661 - RNA, 33 nt, Homo sapiens
aaacagacaggaagaggaagaagagagggcgaa

SEQ ID NO: 255662 - RNA, 74 nt, Homo sapiens
gccagcaggagcgccggggccggggcgaacgcggccgagaaaccaggcggggaacaagccagcagcccaaggag

SEQ ID NO: 255663 - RNA, 78 nt, Homo sapiens
accgcagcggccaggccacagccgcagagaggaggcagcgggaagaaacccgcagaagaccgcgacggggcgagccgg

SEQ ID NO: 255664 - RNA, 92 nt, Homo sapiens
agccgcgcggcggccacggcagcgcccacggccaccccgccgcgcaggagcgggcaccacccaaagaagcggccagaaggcacaacagcccg

SEQ ID NO: 255665 - RNA, 77 nt, Homo sapiens
gccgccagggcgaagacaccaaaccaccagaacagaccgccaccaggaagaaagagacaaagacgaaagaaaagcga

SEQ ID NO: 255666 - RNA, 57 nt, Homo sapiens
acagcccaggcccagcacggcaaagcaaggcagggggaggcaagcccaggaaagaga

SEQ ID NO: 255667 - RNA, 77 nt, Homo sapiens
gccccggggaccagaggagaccgccacacaagagaagacccaccgaggaggagcggccacgccccaacccaggcaca

SEQ ID NO: 255668 - RNA, 59 nt, Homo sapiens
caacccccagaaagccaagccggacaagggcaaaggaggaagaacggggaggaagggaa

SEQ ID NO: 255669 - RNA, 83 nt, Homo sapiens
ggccaggcgccggccggcgcgaagacgcgggggccgccccccggaaacaaaccacaggcccccagaaagaccgggacgaaaac

SEQ ID NO: 255670 - RNA, 69 nt, Homo sapiens
ccaacacaaaggcccagcacgcacgccaagacgaggcgacgaagacacgcaagcgacacgggaaagcac

SEQ ID NO: 255671 - RNA, 72 nt, Homo sapiens
gcccccaagagcgagaacagagacaagggcagagccaagcgccgcccgggcccaagcacccgcccagcccca

SEQ ID NO: 255672 - RNA, 68 nt, Homo sapiens
gcgacagcacagaagacagcgccaagggagagagaaacaagaaaccggacaaacggagcccacacaac

SEQ ID NO: 255673 - RNA, 77 nt, Homo sapiens
gaggagcccagaccgaaccagcaaggcgccaccggaagaaacgggaggggaggagccgggaaagacagcgccaagcc

SEQ ID NO: 255674 - RNA, 105 nt, Homo sapiens
ggaacagacacggggaagcgcaaaaacaagacggggcgccccacagaggggcgacggaagaagacggcacgggacccccagcacaggcagcaggccgggagagaa

SEQ ID NO: 255675 - RNA, 85 nt, Homo sapiens
agagcacccagggaaaggagacaaggaccgaaacagaaacggaacaccaaggccagggccggaccagcacggcaagaggggggag

SEQ ID NO: 255676 - RNA, 54 nt, Homo sapiens
ggcagagggcagcaagaggcgcgcagagggcgcagacaccaaccacaacaaccg

SEQ ID NO: 255677 - RNA, 62 nt, Homo sapiens
ggaggggagggaagagacaggaagagggcccaggaagccagcccggagggagagaagggaac

SEQ ID NO: 255678 - RNA, 80 nt, Homo sapiens
caggcagacacagacaacaaggggaaggagacgccggcgcagacagaggagacgaaacgccaccccggaaacaggaagag

SEQ ID NO: 255679 - RNA, 74 nt, Homo sapiens
ccgcggagaccccaccgccggcgcgggaaacgggcgaagcgacgagccgcgaggaggaagaagagagggcgaag

SEQ ID NO: 255680 - RNA, 43 nt, Homo sapiens
ggccacggcagcgcggccacacccggaaccaaaaagaagcccc

SEQ ID NO: 255681 - RNA, 90 nt, Homo sapiens
cgcggcggggaaaaggcggacgggaaggcgggagacgagaagccgaaaagcgcagcgagcggagccgccggagccaagcaaagaaggccc

SEQ ID NO: 255682 - RNA, 57 nt, Homo sapiens
gaaaaggaggccaccaaacccggacagggaaagaccaaagccaacaaaggaacgagc

SEQ ID NO: 255683 - RNA, 106 nt, Homo sapiens
ccggacccgcaagcagcccaccacgccacaaacgccgcaccaggcgagcagcgcccccggggagaaccgccagcgacgggaaggcaggacccacgcacgagcaacg

SEQ ID NO: 255684 - RNA, 79 nt, Homo sapiens
cgcacccaggaggcggagcggacaaggcccggccgcgaggaggaccgacagcacgaggaggagagaagaaaagcggccc

SEQ ID NO: 255685 - RNA, 76 nt, Homo sapiens
acgggggccaggcgccggagaaagcgccgggcagggaagggagagcacaccgcgacggcgagaggagacacgggaa

SEQ ID NO: 255686 - RNA, 72 nt, Homo sapiens
ggggccagcacccagggcccaccagaagacaggaagccaaagaccgggaaccccaggggcgagcgaagaaaa

SEQ ID NO: 255687 - RNA, 78 nt, Homo sapiens
ccgcgcgccgagaagcacccgcgacccagaagagcaaagaggcccaggaccggaccccgacggagagagaagacacca

SEQ ID NO: 255688 - RNA, 85 nt, Homo sapiens
aagaaccccggcgaggccaacaccacgcagccccggcaaagcccagggaccgacgaggacacagccggcgccccagcccaacaag

SEQ ID NO: 255689 - RNA, 57 nt, Homo sapiens
aaaagaggagcagcaggcacagcacgggcagagccagaccgcagcccaccaaagaaa

SEQ ID NO: 255690 - RNA, 69 nt, Homo sapiens
ccgaacaacgccagggacagacaagcgggagggacaagaagaaaggggaccgagagccgggaaggccga

SEQ ID NO: 255691 - RNA, 37 nt, Homo sapiens
gccaggccccggaagccggaggagcccgacaaggagc

SEQ ID NO: 255692 - RNA, 71 nt, Homo sapiens
caagagaaacaccaaacaagacaccaagggagaaggcaaaacagagaggagagacccaccaaaggaacagg

SEQ ID NO: 255693 - RNA, 58 nt, Homo sapiens
cgaagcaaacaacgccagcgggacggagagcgcaccaggacaaccagggaagcagaag

SEQ ID NO: 255694 - RNA, 98 nt, Homo sapiens
gccagggagaccccgacagcaagaacagggccagaacagagagcgggaaaaggacaaggcggagaagccgccgcgccaggggccgccgggccgggaga

SEQ ID NO: 255695 - RNA, 36 nt, Homo sapiens
gagggccgcagagcaagaagagggaggaaccgaaag

SEQ ID NO: 255696 - RNA, 75 nt, Homo sapiens
gagaccagcagagcgccccccccgcaccccagccgaggcaaagggccaacaccaacaaggccaggcagaacaaac

SEQ ID NO: 255697 - RNA, 94 nt, Homo sapiens
gacacggagaccagaaagccgacaaaggaagaagaacagacaaaaggcagcacacaagacagaacagagaaaaggaggccggacaaaaacccac

SEQ ID NO: 255698 - RNA, 73 nt, Homo sapiens
cggaccccgcaacgcggaacccaagaaggcggagagaggaagaccagcgcaaagagaaaggaaaagaagaagg

SEQ ID NO: 255699 - RNA, 43 nt, Homo sapiens
ccgagccccccagccacccaaggccagagcaccaggccccaac

SEQ ID NO: 255700 - RNA, 78 nt, Homo sapiens
cacaggaagacacaagcaggcagaaacaaaaccaacagcagcccaaaaaggaaaagaagacgccgaagagggcagggc

SEQ ID NO: 255701 - RNA, 78 nt, Homo sapiens
gggcacaacccagccaccgagaaggcacggcaccagacagaagacacggcccagggaaacgccgccacgaaggaccgc

SEQ ID NO: 255702 - RNA, 79 nt, Homo sapiens
caaaaacaacagggacgaaaaaagacagggccacccaggcccgcagaagacgcaggaacacccgacagcagcccccccc

SEQ ID NO: 255703 - RNA, 61 nt, Homo sapiens
ggaggagcgggacaccccggaagcgggaaagggacgccaccggaccagccgcccagaaaag

SEQ ID NO: 255704 - RNA, 76 nt, Homo sapiens
gacagcgccggcaacacgcggcacaagacaagcgcgcaagacgcaacacaaacgagaaagacagcccgaacggaga

SEQ ID NO: 255705 - RNA, 85 nt, Homo sapiens
cagacgaggaagacccggaaacaggggccacggagccacggccacggccgcaaggcggaccggggcaaggagacggccaagaaac

SEQ ID NO: 255706 - RNA, 81 nt, Homo sapiens
gcacacgaggagccgaaaaggaaaagcaagagcgaaggagaaaggcaacaaggcccgagcggggaacacgagagccacagg

SEQ ID NO: 255707 - RNA, 82 nt, Homo sapiens
ggaaccggagaagaggagaggaagcaacaaggcaccacgccacggaccccaccaaacacagccgaggagcggagggagacca

SEQ ID NO: 255708 - RNA, 63 nt, Homo sapiens
aaaaaacgcggaggacaagaagggccggcccaacagcaggaaagggagagaggagaaccaggc

SEQ ID NO: 255709 - RNA, 72 nt, Homo sapiens
ccccgcaagaaacgggggaagcagagcgcacaaagggaaagggcaacgaagcaagagccccacacaccaaga

SEQ ID NO: 255710 - RNA, 75 nt, Homo sapiens
gcgggcggcgacccggcacacaaagccagcagcagggagacaaagcggaaggccaagcagggcccagagaaaccg

SEQ ID NO: 255711 - RNA, 67 nt, Homo sapiens
caggcgggaagaggcgaaggccagagcacgagcacgggaagggcggaagacccggggcgcgaggaca

SEQ ID NO: 255712 - RNA, 88 nt, Homo sapiens
aagaagagaaggacggccgaggggcccccaaccagaggaccgccgggagagccgcccaccccccacccggacgccgggcgcgcccggc

SEQ ID NO: 255713 - RNA, 64 nt, Homo sapiens
aaaaaggacaccagaaagagaggagaagggaacaaccgaaaagacagcagaccacagcccggca

SEQ ID NO: 255714 - RNA, 88 nt, Homo sapiens
cggccgccggcgcgggagggcccaagaggagaagacggcggcggcgagggggggcgcaagcacaagcgaggggaagccccacccaaaa

SEQ ID NO: 255715 - RNA, 70 nt, Homo sapiens
acccggacggggaacgagaaagaaaagaaaagaagggagccagacaacaggccaagagacagacaccaaa

SEQ ID NO: 255716 - RNA, 72 nt, Homo sapiens
gcgggagagggaccggaacggcggcgacaaggggcccgaacagaggggagcaacaagaggaacccggaaacc

SEQ ID NO: 255717 - RNA, 78 nt, Homo sapiens
gcccccgagggcgggacacagagagagacccagcgccagagagaccagcgaacccagagcgacacggcaaaagggacc

SEQ ID NO: 255718 - RNA, 66 nt, Homo sapiens
agaacaaaggagagaggaccacccagaggagcaacgggaacggcgagggaacccaggaaggagggc

SEQ ID NO: 255719 - RNA, 78 nt, Homo sapiens
agaaagcggcacgaacagagccgggagcaagaagaacacccagagggaggggaagggccgaaacagacaaccgagagg

SEQ ID NO: 255720 - RNA, 62 nt, Homo sapiens
acgaccaacccgcgagaaggaagcaagggccgcacaaagggagagcaggaggccaagacaac

SEQ ID NO: 255721 - RNA, 77 nt, Homo sapiens
aaaaagccgaaacaggcagcgagcacacgacgaaggaggacagggaacgaagacccggagacacagagcaccaacag

SEQ ID NO: 255722 - RNA, 75 nt, Homo sapiens
cggcgacgaggggcgccacacgcgcaggcaccggcccagagagcagggacacacgagggccggaaccaaacgaaa

SEQ ID NO: 255723 - RNA, 46 nt, Homo sapiens
aggaggaaaacacacggagcaccagagaaggaagagaagaacaagc

SEQ ID NO: 255724 - RNA, 67 nt, Homo sapiens
ccgaaaggcccacagggggcaccaaagagagcgcgcacaggcggaacccggcggccagagagcagaa

SEQ ID NO: 255725 - RNA, 74 nt, Homo sapiens
gacaagccgagagaaagcaagcaaagcccggaccaaaaaacaggccaccgaggaaagaggggcccaagcacaaa

SEQ ID NO: 255726 - RNA, 126 nt, Homo sapiens
ccacgacaccccacccagacgaagacagcccggacaccgacagcacagacagaacccgcaccaggacccaaagaacaagccacacgcccacaaggaagaaggaaacaggaaaggcgaaaaaggaag

SEQ ID NO: 255727 - RNA, 72 nt, Homo sapiens
gcagacgagaagagaacgaaaaaacaaacagcaaagaacagcagccagggagcggagaagggaggcgggacg

SEQ ID NO: 255728 - RNA, 79 nt, Homo sapiens
gacggcagcgccaagcaggagcgaaggaccagggcggagaacggaaaagcaccaggaagcagagaggaccgcagaaggg

SEQ ID NO: 255729 - RNA, 73 nt, Homo sapiens
gcagcccagccaggaagagccgggaagcagcaccaacccggcccaccaaaccccgaacaggacaaagggaacc

SEQ ID NO: 255730 - RNA, 83 nt, Homo sapiens
acacggggaagcgcaaaaacaagacggggcgccccacagaggggcgacgccgcagccagaggaacagcggagcaagagaacca

SEQ ID NO: 255731 - RNA, 64 nt, Homo sapiens
ggacacaaccgcgaggaggacgccgcgcccaaggcacgcgagaaggggagggggagaaagaaga

SEQ ID NO: 255732 - RNA, 53 nt, Homo sapiens
aagcgccgggcggaccagcaggagcggcagcccacaagcaggaagaccagccc

SEQ ID NO: 255733 - RNA, 73 nt, Homo sapiens
ccacaacagagcgcaagagcggggaacaacaacgggacacccccgaaggaggccagcaccccagggcccccca

SEQ ID NO: 255734 - RNA, 74 nt, Homo sapiens
caagaagacagagacggcacgacggcagacacggcgcagccggcaaaaacagaagagcgagccgaccgaagcaa

SEQ ID NO: 255735 - RNA, 90 nt, Homo sapiens
cgaggaggccgaggccgggaggccggcccggaggccagcgccagacgggggagaccagcgcagcaccgcacgggccaggccggagaccac

SEQ ID NO: 255736 - RNA, 75 nt, Homo sapiens
ggcggcggccagggacccaaagagagaaaaaagccgcccacaaggagagcgaccacgggggacggaaaaggcgca

SEQ ID NO: 255737 - RNA, 52 nt, Homo sapiens
aagacacgacaccagacagagacaggacaacaccacagacagacagaaagcg

SEQ ID NO: 255738 - RNA, 83 nt, Homo sapiens
gcacccgagcaaaccccagcaagagcggaggcgcccggcggagcagaggaaccacacgcgacagacaagcagaccggaagacc

SEQ ID NO: 255739 - RNA, 81 nt, Homo sapiens
ggccggaacgaaagcaggacggaggagcgaccaccgaacagcgagccaagagggcggaaacaggaaggggcgcacaggccc

SEQ ID NO: 255740 - RNA, 77 nt, Homo sapiens
ggacggggccggacaccccgaccccgcagaggcccccacaccagccacgaagacagccggagggccagagggggcga

SEQ ID NO: 255741 - RNA, 85 nt, Homo sapiens
gggcagaaacccaagagggcggagccaaccagcccccggccacacggccacaccagagcccacagcagccgccacagggaagcca

SEQ ID NO: 255742 - RNA, 77 nt, Homo sapiens
aggaggaggcggagcggggcccgacggcagaagcacaaacaaccgaaaaaaagccgagggcaagaaaaacccggcgg

SEQ ID NO: 255743 - RNA, 65 nt, Homo sapiens
agcagagcgcaggaaagacaagccgggagcagacaagagaaggaagaaaccaaacgaaacacaac

SEQ ID NO: 255744 - RNA, 71 nt, Homo sapiens
acagaggacacccggcagccaagcagacgcagaaccccagacaggcgcccgcgggcacgccgcccgccggg

SEQ ID NO: 255745 - RNA, 73 nt, Homo sapiens
cgagagcgagagaagggaccagccagaagaaacaaccgacaaccccagccaaacgacgcaccaaacccccacg

SEQ ID NO: 255746 - RNA, 75 nt, Homo sapiens
gaagaaaaaaaggaaaaaaccggccgaagagaggcaaaaaggggcacagagcacaaagacaggggcggaaagcag

SEQ ID NO: 255747 - RNA, 82 nt, Homo sapiens
cagaaaggaagcgcgggccagcgacccgcgccagcgcccagggggggaaaccaccgccggagacgggaagcccaacgcgaag

SEQ ID NO: 255748 - RNA, 81 nt, Homo sapiens
ggcgggccgcccaacaacgccgagagagccccaccacacagggccaacccaccccaccgaggccgcagacaccggggagag

SEQ ID NO: 255749 - RNA, 82 nt, Homo sapiens
gcaagcggaagcgccccaccgcgggcgccaaggggagcagaaggaccggacacagggaggccggaacggcagagaccagagc

SEQ ID NO: 255750 - RNA, 71 nt, Homo sapiens
gcagaaagcacagcaggccaccacaaagaaggcccggaaacccgaagaggggagaaaaggaacaagaaaac

SEQ ID NO: 255751 - RNA, 80 nt, Homo sapiens
gaagagcacgaaaaaaccaaagacgggcgcaaagagcgaagaaaccagccagaagggcgcgcaaacgaaggaaaaggaaa

SEQ ID NO: 255752 - RNA, 109 nt, Homo sapiens
aagccaggcaaccccaccggccgacagccgcgacggcgagcccgggccgcgcccgaggaaacacacgccgagaagacggccccacggagacggccagaacaccacagcc

SEQ ID NO: 255753 - RNA, 81 nt, Homo sapiens
aacagcacggcgggccccagcccgggccggcccagggagaacgcaaaaccaccacccccacaaaaaacgcagggagaaaag

SEQ ID NO: 255754 - RNA, 71 nt, Homo sapiens
acaagagaaaaggcccgccccagcaaccccggagggcgcgcgcccagaagaggccagagcggaagccaaag

SEQ ID NO: 255755 - RNA, 81 nt, Homo sapiens
ccggagaggggcggcgccgcgcggccgagaggcgacccgcggcgagagcccccccagagcgccagggcccgagaaggcggc

SEQ ID NO: 255756 - RNA, 79 nt, Homo sapiens
ccaccgcccagcgggagaggagcccaccaggacgaccgcgccgcccagcacgccaggacgaccgcaggcccaaagggga

SEQ ID NO: 255757 - RNA, 77 nt, Homo sapiens
ggaaacgaggccggagaggaaagagacccgcagagccacagggcagcggacccccgagggccaccaacaagcccagg

SEQ ID NO: 255758 - RNA, 74 nt, Homo sapiens
gggggcgccggaacaacgggcgaggccccggcgaaggagcgcaacccaggaaggacgcccaggacgggaggagg

SEQ ID NO: 255759 - RNA, 65 nt, Homo sapiens
ccgagagaagaagaaggggcccaaagcaccgcaaggcgagaacgggaagcgcacaaggaaaccca

SEQ ID NO: 255760 - RNA, 58 nt, Homo sapiens
cccggaaccgcgacggcggcaggggagacaacaggaggacacggaagagggaagaaag

SEQ ID NO: 255761 - RNA, 73 nt, Homo sapiens
gccggaagagacacccaagcaggagagaagcacaaagacagcaggagacaacccagagcaagagagacaggcg

SEQ ID NO: 255762 - RNA, 76 nt, Homo sapiens
cacaaccacagcaagagcaccggcgaccgcaccacaagggacgagaccaaacggaagaggagccaaggaccaagag

SEQ ID NO: 255763 - RNA, 78 nt, Homo sapiens
gggcccgacgcacacgggggcggacaccacaagaagggcgccagaaaacggggacggacccaggccaggaaagaaaga

SEQ ID NO: 255764 - RNA, 77 nt, Homo sapiens
agagggacccaccacaaaggcccacaacagagaggcagcagggccagcggccagacccgacccaaggaccacccacc

SEQ ID NO: 255765 - RNA, 69 nt, Homo sapiens
caggcaaagccagaggggaacaagacggaaccgggccaaagcagaaccacaagaaggcaacccggcaac

SEQ ID NO: 255766 - RNA, 71 nt, Homo sapiens
ggaacacacacagccccgggcccagcgccaacacggacacggaccagccacacaaggaaccacaggcccgg

SEQ ID NO: 255767 - RNA, 78 nt, Homo sapiens
cgcaccgcacaacaagaggccggcggggcgacagaccccgcgaggcaagacaagaccaggcacacgaccaagaagcag

SEQ ID NO: 255768 - RNA, 78 nt, Homo sapiens
aaaaggagcgggaggccgaaggagggccacaaagcgggcacaggccgggcacagcaaaaacaacacccacgagaccag

SEQ ID NO: 255769 - RNA, 66 nt, Homo sapiens
gccagaaaacggaggaagacccagaacagaaagagaagcaccagcaccaagaccagccagggagac

SEQ ID NO: 255770 - RNA, 75 nt, Homo sapiens
accgcagggacgcgccaaggccacggccgaggaaggaacggccaggagaacaaccagcaccgggacccaaacagc

SEQ ID NO: 255771 - RNA, 81 nt, Homo sapiens
ccgccagccccccacccaaccagccaacagagccccgggccccaggcgcagacggaccgcgagagcgaggaacgggccacg

SEQ ID NO: 255772 - RNA, 71 nt, Homo sapiens
ggacagcgcgagccaggacccggcccgagagagaaagggaaagaaggagcggagcagaacaaggaccccca

SEQ ID NO: 255773 - RNA, 56 nt, Homo sapiens
accagcccaagaaacaccaccaacaaaccgaggaaagcggacggcggggagccgcc

SEQ ID NO: 255774 - RNA, 78 nt, Homo sapiens
acagccaggaccaggcacccgggaaggacaggacaaagcccccagaacaccggggaaccacccggccccagaggcccg

SEQ ID NO: 255775 - RNA, 71 nt, Homo sapiens
aaccagaggcagccagcagggggaggcacaggccgcgagacgacgacccgccccgcacacggcccaggagc

SEQ ID NO: 255776 - RNA, 72 nt, Homo sapiens
gaacagaaaccccaaacaacacgagaacggcaacaaggagaaaggaagacccgcggaaggcacacaagacac

SEQ ID NO: 255777 - RNA, 58 nt, Homo sapiens
gaccgggccagaggaaccagacgcccaaacgcacggagaaccacggggaccaagaagc

SEQ ID NO: 255778 - RNA, 74 nt, Homo sapiens
aaggcgccccaaggccagacaaaacggagaccggcgacggccggcgacacccccaccgccacgggcaaccgcgc

SEQ ID NO: 255779 - RNA, 71 nt, Homo sapiens
accgaacgaaaggagaaacggaaaagacccccagacgaacaagggaaaggagccagagagagaagacgcaa

SEQ ID NO: 255780 - RNA, 71 nt, Homo sapiens
agagggcccaggcgccagcagggccaaccgcagaggccgacgggaagggcacgagacaaggaaagcacaaa

SEQ ID NO: 255781 - RNA, 93 nt, Homo sapiens
gcgaggacagaggacagcacgcaggagggacacacggcagagcaccgacggacggggcaggaaccccaggagcaaaaagaaagggaggaacag

SEQ ID NO: 255782 - RNA, 84 nt, Homo sapiens
gcggggcgggggggggcagcggcggagccgcccggacgcaaggcgccaccggaagaaacgggaggggaggagccgggaaagaca

SEQ ID NO: 255783 - RNA, 72 nt, Homo sapiens
gaagaccacagagggacccggacaaccagaggcagccagcagggggaggagagcgcgagagacacgaggcca

SEQ ID NO: 255784 - RNA, 52 nt, Homo sapiens
aacagaagcaaaaagccgacagaacaaggccccccacccgccagcagcccgc

SEQ ID NO: 255785 - RNA, 72 nt, Homo sapiens
aagccggagacagccacaaaaaaggacgacagcaccagaaaaacacggagagcaacaaagagggaagcggag

SEQ ID NO: 255786 - RNA, 90 nt, Homo sapiens
ccaagcagcccgcgcccccaagcagccgagcccgcggccggagagcggaggagaggcaaccgcgcccgcgagagccgcggcagcccaagc

SEQ ID NO: 255787 - RNA, 72 nt, Homo sapiens
cgaaagcggcgccaaggacccgaagagacacccaaagacccagacgacaagcgaggcaagaaacaacgggga

SEQ ID NO: 255788 - RNA, 75 nt, Homo sapiens
gccagcgccagcgcagcccggccgcgcaccgcccagcgagccggggccccgcgcccacgcgcagaggcccaagaa

SEQ ID NO: 255789 - RNA, 51 nt, Homo sapiens
gaacacagaagagaggagacagacgcggagaaacaacacgcacagggacac

SEQ ID NO: 255790 - RNA, 81 nt, Homo sapiens
gcccaggcgcgcaaaaagaacggcaggaacgggcgaacaggcacacagagaaaaaaagggaacaaaacacagcaagcagac

SEQ ID NO: 255791 - RNA, 84 nt, Homo sapiens
aaggcggcagaggagagcagcagccaggagacaagcaaagggcagcccgccggaccaaaccggaagaagcccagcgccgaagca

SEQ ID NO: 255792 - RNA, 40 nt, Homo sapiens
gccagcgggagcaccacagggggggccgcccgcccaaggc

SEQ ID NO: 255793 - RNA, 67 nt, Homo sapiens
aaccgcgcaggcccccacaggggccaccagaacccccagcgaaaggcaaagaaagaaacagaaaagc

SEQ ID NO: 255794 - RNA, 76 nt, Homo sapiens
gaggggaacgaccgaaaacggagggacaaggcacacgcgggacggagcccggacccagaccagcccaggaccgggc

SEQ ID NO: 255795 - RNA, 85 nt, Homo sapiens
aaaaagacccagcggagcaggaagcgggaaaccacaaaggaagaagacccagaaagaggccccagaagagcccaagaagaaaaga

SEQ ID NO: 255796 - RNA, 50 nt, Homo sapiens
cgggccgagcccagagccgagcaaggggaacaaagcggcaaaagaaccca

SEQ ID NO: 255797 - RNA, 74 nt, Homo sapiens
acaacaccggcaggaaccaccaggacagaagaccgcaagagaaaaggcaaacagaacaaaacgaagaggagaaa

SEQ ID NO: 255798 - RNA, 61 nt, Homo sapiens
cgcacggacccccaggggacgacccaccggagcccggacgcgaacaagagaggcagccccg

SEQ ID NO: 255799 - RNA, 62 nt, Homo sapiens
gcgggcagcgcagccaggccgcgggacaaggaagggggagcaacagacaagcccgaaaggaa

SEQ ID NO: 255800 - RNA, 79 nt, Homo sapiens
gggacaaggaggacaaccccgacgaagcaggggagcggagcagaggagcaagcagacacggcacagccaacaagcggag

SEQ ID NO: 255801 - RNA, 89 nt, Homo sapiens
ccccggcagggccccagcgcacgcgggcaggaaaggaggagaacagcagcggccaagacaaggcggccggaaacgccgaagggaccagg

SEQ ID NO: 255802 - RNA, 77 nt, Homo sapiens
cagaggccgccacaaccgccagacaaccggagccacgccccacgaccgccagacaccgcagggcaacccaccacacc

SEQ ID NO: 255803 - RNA, 79 nt, Homo sapiens
caaggaccggccgacacgcggcccccgaccggaaggaccaagcacccggagcagcacaagccaagccagacacgcggag

SEQ ID NO: 255804 - RNA, 75 nt, Homo sapiens
gaaaacacccaagcaacgggaccaggcgcgcaggcaggcacaaggcccaggcacaggccccaggaggcccaaaag

SEQ ID NO: 255805 - RNA, 76 nt, Homo sapiens
acagaccccaagagagcccaaaggacaggaaaagcacgcccaggacacacacgggacgaacgacaccgggcccccc

SEQ ID NO: 255806 - RNA, 74 nt, Homo sapiens
ggagcgaagcccgagcgcgaggaagcacgccaaggaggacagcccaaggcggaaaagcgaaggaagccacaagc

SEQ ID NO: 255807 - RNA, 76 nt, Homo sapiens
acggaggccccggacggagaaaaagaggaccgccggggccgcgccggggcagccacgagggagccccgcaggagcg

SEQ ID NO: 255808 - RNA, 77 nt, Homo sapiens
acgcaccgcacaacaagaggccggcggggcgacagaagaggagagagcggcaggaagacaggaaccccgaaaccaaa

SEQ ID NO: 255809 - RNA, 79 nt, Homo sapiens
gcaacccagcacgaacaaggacaggccggcgaggagagacacgacaagacaccgaggaggagcaccccggcgccggagc

SEQ ID NO: 255810 - RNA, 75 nt, Homo sapiens
agcaagagcaccggcgaccgcaccacaagggacgagaccaaacggaagaggccggaagaaacgcggaccgcggag

SEQ ID NO: 255811 - RNA, 71 nt, Homo sapiens
gggacgggggcggcccagaagaggcggaggcgggggaccaggaccgccccccggccccgccaggggacaga

SEQ ID NO: 255812 - RNA, 93 nt, Homo sapiens
caagccagggacagccaaccagggggaggcagcgagaggcgccacccccgggcacgcagaacagacgccccagcaccgccggcaaggccgcac

SEQ ID NO: 255813 - RNA, 71 nt, Homo sapiens
cgcagcaagaccgccagccagagaacgcgagaccggggcgaaacaagcgcagccaagacgcaggggcacaa

SEQ ID NO: 255814 - RNA, 59 nt, Homo sapiens
gaaagcagaaccaaccggaaggagcggagcgacaaaagagaagaccagaaagaaaagac

SEQ ID NO: 255815 - RNA, 60 nt, Homo sapiens
cgaggcccgcaccagccgcgccgccgccgcaggacaaccacaccgaaggccaccccaaga

SEQ ID NO: 255816 - RNA, 53 nt, Homo sapiens
acacccaaccaggcacagagaaaggaagaagagagggcgaaggaggccacaca

SEQ ID NO: 255817 - RNA, 73 nt, Homo sapiens
gccagggcggaagcccgccccagagcaggcccccgaggagggaacaagccagaccaggaggagaaaacaaaaa

SEQ ID NO: 255818 - RNA, 77 nt, Homo sapiens
agagagaaagaagaaaagcggaaaagaccgaaagaggaaagggaacacggaccgacccaaccgaagaaagccaaaag

SEQ ID NO: 255819 - RNA, 79 nt, Homo sapiens
ccacccagagcgcacggcgacgccccaggggaaaacccccgggaccagcgcagaaaaacgcaaccaacgggaagaggcc

SEQ ID NO: 255820 - RNA, 64 nt, Homo sapiens
ccaagccacagaccgggaaagcacaccgcgcaagaacaagaggcccagggcggcggccgaaacc

SEQ ID NO: 255821 - RNA, 80 nt, Homo sapiens
agagacacagggagaaaggaagggaaacacccagacccaaacacgaagggcaggcgccccaggagccacacgggcagcgg

SEQ ID NO: 255822 - RNA, 78 nt, Homo sapiens
agcgggggagaggacgcgcgaaccagcagcaggcccagcaccgagaaggcagggaacagggcagcaacccgcgggccc

SEQ ID NO: 255823 - RNA, 98 nt, Homo sapiens
cgccgcccagcccggccccgcccgcgccggaagagccacgccgggggcagagccggagccggagccggagccgcgccgcgccgcaccaggcgcccacc

SEQ ID NO: 255824 - RNA, 80 nt, Homo sapiens
accagggagagaacacgcggaccggggaagaaacgagcgagcccgggacagcaagagccaagcgccgggacagccagggc

SEQ ID NO: 255825 - RNA, 51 nt, Homo sapiens
cgaagaccacgccggccgcgaccaaggaagcaaaaccacacgcaaagcaga

SEQ ID NO: 255826 - RNA, 68 nt, Homo sapiens
ggaaccggaggagaagcccagggagcgcaccccaggaaaccaggaccaagaaaggcccagggaccaaa

SEQ ID NO: 255827 - RNA, 54 nt, Homo sapiens
cggcaaccgcgcggcaggccaggggaccgcggaggagcaccggaacacagaagc

SEQ ID NO: 255828 - RNA, 71 nt, Homo sapiens
agaacaagacggcaacccgggagagacagaaacggacaggcacaccggaacaccggcagagagagagacac

SEQ ID NO: 255829 - RNA, 68 nt, Homo sapiens
gcggggaagacacgaaccacccggagaggcaggggggcgggacgggagagcgggccaaacccaccacc

SEQ ID NO: 255830 - RNA, 84 nt, Homo sapiens
gaggacggaccaccgggcggcgggagcccgcacgcccagggcacaccccaacacccgccaccccgaggcaggaacagcacccgg

SEQ ID NO: 255831 - RNA, 76 nt, Homo sapiens
ggagagccggacacaaaccggagaacacgagaagaggggagaaaaaccaccaaggggcaaggggagaacggcaggc

SEQ ID NO: 255832 - RNA, 100 nt, Homo sapiens
agcacagcagaaaaggacacgaaaggaagggccaccccacaccagcggcggagaaaccaccacaaacacgaggccagcaacgaccaacaagacagacccg

SEQ ID NO: 255833 - RNA, 70 nt, Homo sapiens
aaacacaaggagacccggagaggaaaacaaaagcgagaaggagggaggaggggaaccacaccaacaggcg

SEQ ID NO: 255834 - RNA, 67 nt, Homo sapiens
cccgaagggcccggggcaaagcacagacaggagaaagaagacagccacagaaagaaaagccgaacca

SEQ ID NO: 255835 - RNA, 44 nt, Homo sapiens
agcagaggcagagcgcccaaaaccgaagaggaggcgccgcgccc

SEQ ID NO: 255836 - RNA, 74 nt, Homo sapiens
cagcgagcggagccggcaggaaggggaccgggcggcggagcggcggaagaagcagggcgagacaggggcaaagc

SEQ ID NO: 255837 - RNA, 84 nt, Homo sapiens
agcccaacgagaaccggagggcaccggagccccccgccccccccgcagcgcgcagagcccggccaagaacaagcagcagccgaa

SEQ ID NO: 255838 - RNA, 79 nt, Homo sapiens
cccgggacaggggcgacgccggggcgccggcgaggaaacgggcccccgcccaacaggcacaaccagagacaggccagag

SEQ ID NO: 255839 - RNA, 59 nt, Homo sapiens
ccccgagagcgggacgcagcggacgccacaacaagccaagacgggggccacgccggccc

SEQ ID NO: 255840 - RNA, 76 nt, Homo sapiens
aaaagacgcgccagaaacccaggggaaacagaccacgcaccagggcccggacgcccgcccggcgcagcggccgaac

SEQ ID NO: 255841 - RNA, 56 nt, Homo sapiens
acagcacagggcgcaacaagagcgacaaacgcaggacaaaaacgcggaggggacca

SEQ ID NO: 255842 - RNA, 71 nt, Homo sapiens
cggccaggcgagcagcggggagcagaaaacagccaggaacccaggaaaaggcaagcaacaaaaaccccagc

SEQ ID NO: 255843 - RNA, 51 nt, Homo sapiens
cgcagggcgcccccgccgaagcgcccaacagccaaacggaacgcgacgcgg

SEQ ID NO: 255844 - RNA, 75 nt, Homo sapiens
caccgcgagggagcgacgcgccaccaccggcaggggccacggggaccaggcggggcaagagcaaccgcgcgcgcc

SEQ ID NO: 255845 - RNA, 58 nt, Homo sapiens
gcacgcacagggccgcgggaagaccagccccaaagagaggagccgcgcgcacccaggc

SEQ ID NO: 255846 - RNA, 89 nt, Homo sapiens
ccaggggcgccccgggagcagccagcccggggcgagccgcccgcccgccgagcagccagaggaaaggacagaagccacaaaacacggca

SEQ ID NO: 255847 - RNA, 55 nt, Homo sapiens
agaagagacccgcaaaggaaagaagagggagaaggagcaccaccccccgggacag

SEQ ID NO: 255848 - RNA, 80 nt, Homo sapiens
gaaccggcgcgccggcgcgcggcgcggacaggcccaaacgcgggagaacagagacccaccaagaaaccagaacccggaca

SEQ ID NO: 255849 - RNA, 82 nt, Homo sapiens
gccccacacaggcacccccagaagacagcaaagccggaaaaccaaaaaggaggggcaacaaaggggacggcgcgcgcgacac

SEQ ID NO: 255850 - RNA, 75 nt, Homo sapiens
agaccagacggaggaggagccggacgggccagggcgggaaggaagagccaaccgcgcaacgaaccgcaccccccc

SEQ ID NO: 255851 - RNA, 76 nt, Homo sapiens
ccagccacaggaacagagacagcgccgcgggcaaggaaacggcaaaacaggcaaaagcagaccggaaaacccaccg

SEQ ID NO: 255852 - RNA, 74 nt, Homo sapiens
ccgccgcggccggcccggccccccgcgcacggccagcgcaggaccaggcacagacaccacgaacagggaggaaa

SEQ ID NO: 255853 - RNA, 86 nt, Homo sapiens
cgaggaggcagcagggaccagagaccgagccggggcacaagggcaagagggaaaaacgcccgaaggagaagaggaagcgacgcgag

SEQ ID NO: 255854 - RNA, 76 nt, Homo sapiens
gaaccccccacaacaccaagagcaggcaggaaggagcaaccaagccgcagcccagcaagccagggagaggaaacgg

SEQ ID NO: 255855 - RNA, 68 nt, Homo sapiens
aacaagcacgggcgagccaggacacgaccacaacacagcccacaggccgacgaccccagcccgggggc

SEQ ID NO: 255856 - RNA, 76 nt, Homo sapiens
cggcgggaccacaagacaacgcggagcggcgaagagcaaccagcggccaggcgacgagagaggcgggagggaagcg

SEQ ID NO: 255857 - RNA, 59 nt, Homo sapiens
cgaacacgccggagccgccagccagcgcccagccggggccccagaaaagcagggaggcc

SEQ ID NO: 255858 - RNA, 72 nt, Homo sapiens
aggaacggggggagagaacccaaccagggggaaacacagaacgcaggggggggggaagcccccccggagaaa

SEQ ID NO: 255859 - RNA, 69 nt, Homo sapiens
cacccaggcgacgcccaccaaggacgaagcgggggcccagcgcaagggccacacggggagcgcgcaaga

SEQ ID NO: 255860 - RNA, 82 nt, Homo sapiens
gcagaggccaggaggacgaggagagacagaagaagcggaggccggcaaagccaagacagccagcaggggcagaagcagcaga

SEQ ID NO: 255861 - RNA, 54 nt, Homo sapiens
aaaaacagaaccacacaaacgcaggcccgcgcgggagcgacacgacaacaacca

SEQ ID NO: 255862 - RNA, 83 nt, Homo sapiens
cccaggcggcggagccccgggacggcgagcggcgggcggcggaggaggagacggcaggggccagagaacaagcccagacagca

SEQ ID NO: 255863 - RNA, 80 nt, Homo sapiens
agagcccgacagagcacaacacacaaggccccccggcagcaggcgaagcggagacgcgccggcgcgcgacccagggcggg

SEQ ID NO: 255864 - RNA, 40 nt, Homo sapiens
ccggaggaggggggagggagagcgaaaccaccaaggggag

SEQ ID NO: 255865 - RNA, 73 nt, Homo sapiens
gagcccgggacacaggagcagcgcacagcggggaccacccacgacccgagcgagccaaagaccacgggggcca

SEQ ID NO: 255866 - RNA, 76 nt, Homo sapiens
aacagaaaggagggaagaagccagaaccagcaaaccacccaaggggaacaaaacgacagacggaccagacacgcca

SEQ ID NO: 255867 - RNA, 79 nt, Homo sapiens
cggccgcggcagggcacccgcggcgccacggccaggacaggggggccccagcccggccgaacgggcgcacgacacaaac

SEQ ID NO: 255868 - RNA, 79 nt, Homo sapiens
cagacggacaagagcgcggaacaggacgccccgacccacccgcgaccggcaagccaggagacgacaacggagccggaca

SEQ ID NO: 255869 - RNA, 73 nt, Homo sapiens
ggagcacagagcgagaccaggaaagaagggggcagaagaggggcaagaacaggggcaggacaacccgaggagc

SEQ ID NO: 255870 - RNA, 71 nt, Homo sapiens
accgggaaaggcaggaaacaagccgcgggaaaggccaaagagcacagggacagaaaaacagcgcagacgag

SEQ ID NO: 255871 - RNA, 55 nt, Homo sapiens
aaacacagcaaaaaccggaaggcaaaagcagaccggaaaacccaccggcaagacc

SEQ ID NO: 255872 - RNA, 73 nt, Homo sapiens
cgaagggaggaaaagggcagggacagcgcaggcagcaggccggaaaggaaaaacaccagaacggaaacagaag

SEQ ID NO: 255873 - RNA, 74 nt, Homo sapiens
gcccgcacaagggcagcccgagaagcagaagacgggcaaccgaaacaggaggcaaagcgaaggcggagcaggag

SEQ ID NO: 255874 - RNA, 74 nt, Homo sapiens
ccgggggccagagaccaaggcgcgcccggcgggccggaccaagccgcacacgacggggagggaagagaccacac

SEQ ID NO: 255875 - RNA, 69 nt, Homo sapiens
aggagggagaacacagaaacccgccccggggaaggcaacacaagaacgacaaagcggccaaggaccacc

SEQ ID NO: 255876 - RNA, 79 nt, Homo sapiens
aacaccaagaggcggacggcccggagagacgaaccgaagcgggcgggcccccccacccagagggcggcaccgaaggcca

SEQ ID NO: 255877 - RNA, 72 nt, Homo sapiens
ggcagccgaaagaacgcaggaaggagaaacacagagggccaggcagcacaggaggaaccaggagcggacgca

SEQ ID NO: 255878 - RNA, 82 nt, Homo sapiens
gacaacgaccggaggcaggggccagacccaagcacggggaagggaaagcagaaagcaaaccccacgagaacaaagcacggca

SEQ ID NO: 255879 - RNA, 35 nt, Homo sapiens
gggagaggaccggagcaggggcccggcgagcccca

SEQ ID NO: 255880 - RNA, 69 nt, Homo sapiens
ccgggacaaaacgagagacagcaaaacaaacggagagaggagggagaaacaaaggccaaagacgcagga

SEQ ID NO: 255881 - RNA, 60 nt, Homo sapiens
cacaggagcgcccgcggaggagcgcccggcgcgaagccaggggcaaaacggggaaccggg

SEQ ID NO: 255882 - RNA, 56 nt, Homo sapiens
ccaccagcggggcagcaaccaggacacccgggaagaaggagacccaacaccccggc

SEQ ID NO: 255883 - RNA, 74 nt, Homo sapiens
cccaggggcaaacgggacgcaaaccaagcagcggggccagcaggcgaaagagaagcaaaggaagaagcgaagca

SEQ ID NO: 255884 - RNA, 35 nt, Homo sapiens
acgccagcaccacggcccccacaaaaaaaacaacg

SEQ ID NO: 255885 - RNA, 71 nt, Homo sapiens
acaagccaacccaggaggaaaaacgccgagaaagcgacaggcaggcccggacgcccaaggcacccacgcgc

SEQ ID NO: 255886 - RNA, 61 nt, Homo sapiens
caaggggccaccaggaggccagggggcgccagacgcgagaaggaagaagaacacaacagaa

SEQ ID NO: 255887 - RNA, 71 nt, Homo sapiens
gcaggacaggaaagagagagaagcccgcgaaaggccaaagccacccccaaaggcagaggaagaacgagcag

SEQ ID NO: 255888 - RNA, 67 nt, Homo sapiens
ggaaaagcaccaagggcaccaaacacccagaacaacaaagaggagcagcagcccaggaggcaagaaa

SEQ ID NO: 255889 - RNA, 55 nt, Homo sapiens
acagacggggccacccccacacgcccccagccaaacaggagagcacaacaaggca

SEQ ID NO: 255890 - RNA, 80 nt, Homo sapiens
gggaaacaaaaacaacgggaggcggaacacgcaccggacaagccaacaaaacgcgcagaggaaaaaggcaagagacagcg

SEQ ID NO: 255891 - RNA, 77 nt, Homo sapiens
caagacagggacaagaggacaacgcagaaagaacacacacaccacacgcacagacgccgggaccggaaagcagcaag

SEQ ID NO: 255892 - RNA, 82 nt, Homo sapiens
caaacagagagaaggaaccacccacgcaggcagggggcaaacgcagaggcgggaacaaacagccccaagacgggaaagagcc

SEQ ID NO: 255893 - RNA, 75 nt, Homo sapiens
cagccgaccgagcccaggagcgccacgcgcggaaggcagcgcccagcagcgcagcagacaccggaaagaagcaag

SEQ ID NO: 255894 - RNA, 59 nt, Homo sapiens
cccccaaaaagcggcaaaagcaagagaacaggcaccgggcgagccccgcggccagcgcc

SEQ ID NO: 255895 - RNA, 75 nt, Homo sapiens
gcagaacgcaggaggagaacgacaggggagaaaacgcaggccacaaagacaggaccaagaggaaaaaacaaccgc

SEQ ID NO: 255896 - RNA, 86 nt, Homo sapiens
cggcgaacacaaaaggcgccgaagcaggacccgaagccaaaccaggaggcgcgggccaggcacgacaccgcaacgacacagcagcg

SEQ ID NO: 255897 - RNA, 76 nt, Homo sapiens
gcagcccgccccgccgggggagacgacccccgccagggcggcacccaccccccgagcccgcccgccggccccagcc

SEQ ID NO: 255898 - RNA, 70 nt, Homo sapiens
gccaggccccaggacagggaggacgccaaccacggccagagggggacccggagaggcgcagagcgcagcg

SEQ ID NO: 255899 - RNA, 37 nt, Homo sapiens
gaggaaacccgacagcaaaggggggcaaaccgaggga

SEQ ID NO: 255900 - RNA, 84 nt, Homo sapiens
gcggccaggcagggaggagaccggcacccagacaggggcgaaggcagaggagcaccaaggaggccccggccgaaggaccaggca

SEQ ID NO: 255901 - RNA, 80 nt, Homo sapiens
cggaaagcgacaccgaggaacagagccccgaagaggcaccagggggcggcaccccggggggcaaggaggcgaaaggaaca

SEQ ID NO: 255902 - RNA, 76 nt, Homo sapiens
cgacaggaaaaaaagcggaagagcgccagcacggaacaggaggcccggacccccagcacaagcgcaggccaggggg

SEQ ID NO: 255903 - RNA, 73 nt, Homo sapiens
ggacgagaacgacggaccaaaagcaccagccccgcgaaggaaccgaagggcggaaaggcacacacaaaacacc

SEQ ID NO: 255904 - RNA, 78 nt, Homo sapiens
cagggccagcacaggcgaggagcccaccagacccgaaacacgcacaggcgcgggaagcgcccacacggcggcggagcc

SEQ ID NO: 255905 - RNA, 79 nt, Homo sapiens
ggacccggggagcggccggaaggaaggaaggaggggaaagccagcgcagcgcgagaagcgacagcgaagaagaagcgcc

SEQ ID NO: 255906 - RNA, 87 nt, Homo sapiens
gccgcgaccgcccgccgggagaaagaaggggcaagaggaagaagcagaagcagagagaggagcgaagaagaagaagcgaccaaaggc

SEQ ID NO: 255907 - RNA, 54 nt, Homo sapiens
cggaggaggcgacaagagccaaggaaaacaacacgaagaccggaccaaaccaga

SEQ ID NO: 255908 - RNA, 53 nt, Homo sapiens
gagaccaaagaggcaagggcaaaaaaacagcacagcagagaacggagcagccg

SEQ ID NO: 255909 - RNA, 70 nt, Homo sapiens
aggccgaccaaaagccaacaaccccacaacaaaaggccacccaggagaagccagaggggaaagaaaaaga

SEQ ID NO: 255910 - RNA, 77 nt, Homo sapiens
ggcacacaccccccaccgccaagccaagagggaggcggaagcaaggagacaaagaagcaggacaagggcgggaggac

SEQ ID NO: 255911 - RNA, 85 nt, Homo sapiens
cgaacggagaaacgagcagaacaccggggacccacagaacgaaaacaaacggaagagagggcagcaagaaagaacaagaaagcga

SEQ ID NO: 255912 - RNA, 78 nt, Homo sapiens
gcaggagcgcccgcccgagccagcccgccagcagccccagccaaaggacggagaacccaaggagaaacacgggagcac

SEQ ID NO: 255913 - RNA, 74 nt, Homo sapiens
ccgcgcagaggggcagggggagggaaggagaaaccaagagccccaaagaggagcacgggcaaaagcaggcaaag

SEQ ID NO: 255914 - RNA, 72 nt, Homo sapiens
cagaggaacgacgggaggagaggagaacacagcaacacccacggcaggaaaggacacagggagggccaagac

SEQ ID NO: 255915 - RNA, 61 nt, Homo sapiens
gggcggcccagcgggcgagacggaggagaccaggccccgccccagcccgggggcagggcag

SEQ ID NO: 255916 - RNA, 77 nt, Homo sapiens
gcccaccccggacccgggccgcgggggcgcggagaagaggaccaggaaagacaacggcaagcggagaagagcaaggc

SEQ ID NO: 255917 - RNA, 81 nt, Homo sapiens
gcccgccggcacgccgccagccccgggggccacgagcgggaggagaaagagaaggaaacccacagacccagcaaagaggag

SEQ ID NO: 255918 - RNA, 76 nt, Homo sapiens
ggagacccgcgcgccaggcgcgcccggggcagggcgaggaaaggagacggcaccaaccaaagggaggcaggaagaa

SEQ ID NO: 255919 - RNA, 72 nt, Homo sapiens
caagagaaacaaccgaaaacaaagagggaaaacggagaaaagcccccccaggccagcgcaggaacacgagag

SEQ ID NO: 255920 - RNA, 76 nt, Homo sapiens
aagcccgaggaaaaaacaaaaagaaaaacccagccccaaaagcaagccccagccaagacccaccaggcaggggaag

SEQ ID NO: 255921 - RNA, 80 nt, Homo sapiens
gcaggcgaggacggcggaccccgcggcgggaggagccgccccgaggaagacccagagagaagacagacgccacaaagaga

SEQ ID NO: 255922 - RNA, 72 nt, Homo sapiens
gaagagaaaaggagggaacacagacccagccgccaagggaggcaagcaggggggcaaaggaaagaaggcaga

SEQ ID NO: 255923 - RNA, 90 nt, Homo sapiens
agccccccgcagcgaccggaagacgaggcggcgggggacaagcggcgccccagagcggacgaggccccaggggcgccacagccgaggcag

SEQ ID NO: 255924 - RNA, 73 nt, Homo sapiens
aacgcgcccaacacccagcgcccccaggacccacccaccacccagcagcccccgaggaccaaccccgggggcc

SEQ ID NO: 255925 - RNA, 54 nt, Homo sapiens
ggcgagccggccgcgggcgcgaccggaggcaggcgaacccaggcacccagagac

SEQ ID NO: 255926 - RNA, 55 nt, Homo sapiens
cggcgcaaaaccagaggagggcggcgaaggacgcaaaagaaggacaaggagaaca

SEQ ID NO: 255927 - RNA, 85 nt, Homo sapiens
gaacaacccagggggacacgcggcccgcaaggccagaccgcggggagcgggaagccaggcgcacaggagcaagcagccaggccca

SEQ ID NO: 255928 - RNA, 74 nt, Homo sapiens
caggcaaacaggaacaccccacacgacaggaccaagcacggaagagagaaggccacgcccgaccccaagcaaca

SEQ ID NO: 255929 - RNA, 70 nt, Homo sapiens
acgcaccaggccaaagaaagagaagaagaccgcccccgacaaagaagacgccccaaaaggggaaagcagc

SEQ ID NO: 255930 - RNA, 79 nt, Homo sapiens
cgcaaacaagggaaacgcccagcgggagggggccaagaggcccacggcgccacaggaaagggggacggaagcggcagcg

SEQ ID NO: 255931 - RNA, 74 nt, Homo sapiens
gcgacggcgagcccgggccgcgcccgagggaaagaggcaaaaccgagaaaaggaccaaagagagcgagaaagcc

SEQ ID NO: 255932 - RNA, 78 nt, Homo sapiens
acagcaaggcggggaagagcgggcgaccaagggaaagcaacggcgcaagcggcggcggcgggcagaggacacacagag

SEQ ID NO: 255933 - RNA, 53 nt, Homo sapiens
cggcccgggcccccagggacagcgggccgagaagaagcggggacggcaaaaca

SEQ ID NO: 255934 - RNA, 54 nt, Homo sapiens
gggacagcaccaccccccggccgaccccccggcagcaagagacggggaaaacgg

SEQ ID NO: 255935 - RNA, 70 nt, Homo sapiens
cgacgccaagcccgggcgcagaccaaagccgacgagccccggagcaggcgacagccggacacaagagggc

SEQ ID NO: 255936 - RNA, 69 nt, Homo sapiens
gggggaaccccaagcgaccccaaccgggcagcaccccccggacagggccacggcccccggcagaaaacc

SEQ ID NO: 255937 - RNA, 39 nt, Homo sapiens
agggcgagcggacccccggagaagcacgagacagacaag

SEQ ID NO: 255938 - RNA, 74 nt, Homo sapiens
accagaaaacacgcagcgcagcccagagcacaggagggggcgcaacggggaacgaggccaccgcacggcccccc

SEQ ID NO: 255939 - RNA, 69 nt, Homo sapiens
gaaggaccaagaaccaggagaacccaggcagcaccagggccaaaagaagaccagggaacccaaggacag

SEQ ID NO: 255940 - RNA, 79 nt, Homo sapiens
ggggccccgaggacggcgacggaggggaaaaaagcgaacgcaaggggccaagaagagcagagcccgagcaagaagagga

SEQ ID NO: 255941 - RNA, 82 nt, Homo sapiens
agggcaaggaagaaaaggcggaccggcgaacgaaggcaccgccagggaggagagcggggcacgcgcccaacgcgcaagaagc

SEQ ID NO: 255942 - RNA, 80 nt, Homo sapiens
gccaggagggcaagccagccaagcaaaggcgggagaggagagagaaggaggagcccagagggagcacaaccagggaccgg

SEQ ID NO: 255943 - RNA, 75 nt, Homo sapiens
acgagacggggggcagggagaaacaacagaaggagcaaagcagggaagggacgcaaaaaggaagccccacaagga

SEQ ID NO: 255944 - RNA, 46 nt, Homo sapiens
gcccacgggaacaagaggggacagaaaggagggccaaaaccaggcg

SEQ ID NO: 255945 - RNA, 81 nt, Homo sapiens
cccccaaggcacagaaccgaagaaaacgggagaaccaccacagacgacgagcagaagagagcggagagcgggaagccacca

SEQ ID NO: 255946 - RNA, 77 nt, Homo sapiens
ggagccgccggccgcagcgcagcgccagccagcaaaagcggaaggagagacaggaagggcacagaaacggcgcgagg

SEQ ID NO: 255947 - RNA, 76 nt, Homo sapiens
aggaaaagacaagcccagagaagcagagaaagacgggagcggggcgcgcagacccaagaggggaagaagaaaccaa

SEQ ID NO: 255948 - RNA, 76 nt, Homo sapiens
ccgaccgcaacagaacggacccgcgagggagaccacaaaaggccccagccaccaggagcaggggaggcggagcggg

SEQ ID NO: 255949 - RNA, 75 nt, Homo sapiens
agagaagcagaacgcaggaggagaacgacagaaacgaaggaggcccaaccacaaaaggagccgacggaacccaga

SEQ ID NO: 255950 - RNA, 57 nt, Homo sapiens
cccagaaccacccacaccaggacgcaggaccggacggagaccccaaagaaacaaaga

SEQ ID NO: 255951 - RNA, 78 nt, Homo sapiens
cggccccggggaacagggagcgcccggcgcacagcgccagggcccagggagggaggggaaaaaggcccgaaccccccc

SEQ ID NO: 255952 - RNA, 69 nt, Homo sapiens
gacaacaggagccaggcagagacagagcagagcccaaaccaggaccacagaagacaagggacgcgcccc

SEQ ID NO: 255953 - RNA, 78 nt, Homo sapiens
aagcccaaacgggaagaagaacgaaaggagcagcagggagcagccacaacacagagaagaacaagacagcaacccaac

SEQ ID NO: 255954 - RNA, 34 nt, Homo sapiens
acggcgcccgaagcggaaggcaaacagggggcac

SEQ ID NO: 255955 - RNA, 91 nt, Homo sapiens
gcgaaacgcccacagggggcggacaagggaggagaaccccccaccgcagcagcccacggagaaggaaacccgaacccagcggagagccaaa

SEQ ID NO: 255956 - RNA, 73 nt, Homo sapiens
aagaagaacagagagaacaaaagagcagaaagcacgcaggagaccagaccgaaaaagcacaaccaagccagaa

SEQ ID NO: 255957 - RNA, 53 nt, Homo sapiens
accgaaacgcaggccaaccgaccacagcgaacggcaccgcgagaagaccgccc

SEQ ID NO: 255958 - RNA, 59 nt, Homo sapiens
gagagaacaggccccagccccccagaacgcggcaaaaaagaaaagaagaagcgaaaccg

SEQ ID NO: 255959 - RNA, 77 nt, Homo sapiens
cccggcgcgagccaagcgcgcgccgggagaccggcgacggccggcgacacccccaccgccacgggcaaccgcgcgcg

SEQ ID NO: 255960 - RNA, 68 nt, Homo sapiens
accgcccagcgaaagccagccagcccacacgcacacgagccagagaagagggccgcaacccaggagcc

SEQ ID NO: 255961 - RNA, 70 nt, Homo sapiens
gcacagggcaaagaaaaagaagaagcacacacacagggaaagcacaaggaagaagcggacggggaagaga

SEQ ID NO: 255962 - RNA, 77 nt, Homo sapiens
cgagaacccgccgcggcgcccgcccagggaacagcggggaggaacagaggaaaaaccaccccaacacccaagaaaag

SEQ ID NO: 255963 - RNA, 82 nt, Homo sapiens
gcaagccggaccgagacggcagcagagcagcagaggaaagcggggaagcgaaggcagaaacacccacaacaggagacaccaa

SEQ ID NO: 255964 - RNA, 78 nt, Homo sapiens
ccagagcggccccccgcgaaacagggggaacgaaacggccccggggggccaggccccgagccccggccccaaagaccc

SEQ ID NO: 255965 - RNA, 112 nt, Homo sapiens
ggccagcacgggaccccccaagagaagcgcaagagcaacaccccaccccaagaaaagaacgggacacgggcgacacagcacagcggggccccaaggccagacccaggagcca

SEQ ID NO: 255966 - RNA, 92 nt, Homo sapiens
ggcaaagccggcgacccgcacagccgcaccccaacccccagacagaagagggacaagccaagaaacccggaacgaggaaaacacggaggaca

SEQ ID NO: 255967 - RNA, 43 nt, Homo sapiens
gagcgaaggagaccaggcaaaaagaaacgaaacgagggcgaga

SEQ ID NO: 255968 - RNA, 33 nt, Homo sapiens
gcaccccggaaccggggcggagaacggaaaagc

SEQ ID NO: 255969 - RNA, 71 nt, Homo sapiens
ccacccacgacaccagcaacgcccaggagcaagacaggggagcgcgcagcgcaggccaggccgccgccaag

SEQ ID NO: 255970 - RNA, 73 nt, Homo sapiens
gcagcagggagccacaccaagccaacagggaagcggagaggacgaagacacccccgaccagagaccccggaag

SEQ ID NO: 255971 - RNA, 80 nt, Homo sapiens
gggacgcgcgcgggcacccacggagccccggggcggagacgccccagaggcgaagccacaggcagaccagaacagcggaa

SEQ ID NO: 255972 - RNA, 84 nt, Homo sapiens
gcaccgcgccggggcccagagcccaggggggcgcaggaaaagcagggaaccagggagaccaggacaaggaacagaaagacccac

SEQ ID NO: 255973 - RNA, 71 nt, Homo sapiens
cagccgaagaaggcacagggagcccgggagaaagacaggcaacggaaaaccaaaggcagggacaaacaaac

SEQ ID NO: 255974 - RNA, 84 nt, Homo sapiens
cgcgacaccgaaggaggaagagagaggacaaagaggacaaccaccaccagcgagcaaaagaacaaagaccaagaccaagaagcg

SEQ ID NO: 255975 - RNA, 82 nt, Homo sapiens
ccagcccagagggaaagcacaccaccccagccagaaacaggaacacgaaagaggaaaaacgcacaagaaaccgaagccaagg

SEQ ID NO: 255976 - RNA, 73 nt, Homo sapiens
ccgccgccgccaccacccacccggacacaggggacgaagggaacccgccgggcggcccggcacccagcccccc

SEQ ID NO: 255977 - RNA, 75 nt, Homo sapiens
ccggccacagggcgccgccaccggggggagacgccgagggacccacacaaccaccagcgagagacggggcacccg

SEQ ID NO: 255978 - RNA, 90 nt, Homo sapiens
aaacacgaaggaacccaaaaggccgccgggccgcggcaggaaaagacaaagagaacccaacccagagaaacggaccgagcagaaggcaac

SEQ ID NO: 255979 - RNA, 74 nt, Homo sapiens
gcggccaggcggcgacacgccaaccccgcaacacccccagggagcgggggcggaaacacggaagagggggaggc

SEQ ID NO: 255980 - RNA, 80 nt, Homo sapiens
aagaaggaaggagggccgaggggaggggcgaccccggggcccggccagcacgaccgaggaggggcggacagcggaggaga

SEQ ID NO: 255981 - RNA, 55 nt, Homo sapiens
agacacggcaggccaagaagcaccgagcacagacagggaggacggagacagccag

SEQ ID NO: 255982 - RNA, 82 nt, Homo sapiens
agacaaacacgggcgacggggcccagcagacagccgaggggagcgcggggcccggcagaaaggcgagaacgcggacaagcaa

SEQ ID NO: 255983 - RNA, 79 nt, Homo sapiens
gccagcggaggagcaagaaggccaccggaaggccgcgggggaaggaggacgcagagagggcacacggggcgaaggagaa

SEQ ID NO: 255984 - RNA, 88 nt, Homo sapiens
ccggggcgccagccgggccacggagaggagcagcccccggagacagcggcacagagggccgccaggagggaccacccagagacgagag

SEQ ID NO: 255985 - RNA, 75 nt, Homo sapiens
cgcaaagaaggaagacaagacaggggacacacaaaccaagggaagacgaggcagcaggagaccagagcaaaaaca

SEQ ID NO: 255986 - RNA, 70 nt, Homo sapiens
gcccaaacagacaggcacggaggaagcaggaaggaccacccaagcggggacgagagccccggcacaaacg

SEQ ID NO: 255987 - RNA, 82 nt, Homo sapiens
gggggccaccgcagcgcccggcaggcaggggaggcgccgcggagaaggggaccgagggcggcaccacgcccaacaccccaca

SEQ ID NO: 255988 - RNA, 56 nt, Homo sapiens
gcacgcgacccaagcaggaggcaggcgcaaggaacgcaaagaaaccaagaggcaca

SEQ ID NO: 255989 - RNA, 68 nt, Homo sapiens
aaccaaggggacaaaccaacagaagggcaaccagcgccaacccaaacgagcgagacacacagaaagga

SEQ ID NO: 255990 - RNA, 58 nt, Homo sapiens
cgcagagcgaaggagaggacgagagggcagagcaaagagccgcagacgcacagcaacc

SEQ ID NO: 255991 - RNA, 76 nt, Homo sapiens
aaagaagccggacagaaagaggaagaaaggagaagagacaccgcaaacaccaaaaagcgcgcaagaaaacaagaag

SEQ ID NO: 255992 - RNA, 67 nt, Homo sapiens
gggagccacggcaccgaacgcggccaagggccggccgacaccggcgcaaggaagaagagacgccgcg

SEQ ID NO: 255993 - RNA, 86 nt, Homo sapiens
ccacacaacccaggcaaccaacagcacacgacagacaacaacaggcaggaccccaggaaggccagcgcccagagaacgcacagccc

SEQ ID NO: 255994 - RNA, 105 nt, Homo sapiens
acgcccccacaacaagagcccaaccaacagcccaggccgccgacgcacgagaagggggcgagaaagcgcgcacgggacgcacacagcacagaagagaaccagaga

SEQ ID NO: 255995 - RNA, 70 nt, Homo sapiens
agccagccacacgaggagacggaaccggagaaaagaagaacaagccacgcccaaaggaaaacaaaagcac

SEQ ID NO: 255996 - RNA, 86 nt, Homo sapiens
aaaggaccagcgcagagggaccgggcggaagcgaggaggcccacacggccggcagcaccgcagccagggcgagccaggccccccgg

SEQ ID NO: 255997 - RNA, 35 nt, Homo sapiens
ggaacgaccgaagaaggacagggaggaagagaaaa

SEQ ID NO: 255998 - RNA, 55 nt, Homo sapiens
agcgccgagcgaacggaagcagaaacaaagcggagaacggagccgccggccaggc

SEQ ID NO: 255999 - RNA, 71 nt, Homo sapiens
gcagcaggcaaacgggcaaaccagcgggccccaagacgcagagaagccaccagggggaaacaagaagaaaa

SEQ ID NO: 256000 - RNA, 67 nt, Homo sapiens
acccccgacgccaggcagcgcccccaaacggaggccaagaacacagaaacggaaacgaaaaagagaa

SEQ ID NO: 256001 - RNA, 49 nt, Homo sapiens
cagaaacacagcgaccgagagagggaagggaacccgagcgagagaggac

SEQ ID NO: 256002 - RNA, 78 nt, Homo sapiens
gcggcccccagcaccacagcccgcagccccgccagccacccccagggagcgcgacccagcgaccagccacacgcccac

SEQ ID NO: 256003 - RNA, 126 nt, Homo sapiens
ggagccagcgcgccagaggggggccgcgagcgcacgagcggcccgccagcgaacccccgagacccaggcccagagcggagacgccaccaccccccagagggaccagaggagcgggcagggcgaggg

SEQ ID NO: 256004 - RNA, 67 nt, Homo sapiens
gcgcccgccccgcgcagagcacagaccagcagacaggacagaaaaccagaagcaccgcagggacgcc

SEQ ID NO: 256005 - RNA, 76 nt, Homo sapiens
ccaccaagggcaacgcagcgggaacgccaccacacaggagaacgaacaagaggcagagaagcaaggacaaggaagg

SEQ ID NO: 256006 - RNA, 91 nt, Homo sapiens
ccaagggcacgggaagaccggaggggacgaagaacgggaacgcaaggcggggaaaaaaaggcagcacacagacgcagcaacgggcacgcaa

SEQ ID NO: 256007 - RNA, 81 nt, Homo sapiens
cccccccaccagaggacgggaggagcagcaacaggcacagaaccgggcacgaccgaaagggcgcaccgggaagaggggccc

SEQ ID NO: 256008 - RNA, 73 nt, Homo sapiens
cgggcccgccccgacgcggccgcagcgccgcgcgcgcgggaggcccagcccccaagccaccccccagccaacg

SEQ ID NO: 256009 - RNA, 70 nt, Homo sapiens
ccccgagggcgggacacagggacaggccaagaggacgggaccaccaggaggagggcagcaccggacagcc

SEQ ID NO: 256010 - RNA, 89 nt, Homo sapiens
gcaggagaagccaagagggggagggcagagagagcaaaaggggcagccgaccgaagaagcggggccaaggagcggagaaggagcgaccc

SEQ ID NO: 256011 - RNA, 54 nt, Homo sapiens
acaaggggaggacaaccgcccgggaccagagaccagcgccaggaccagaagcca

SEQ ID NO: 256012 - RNA, 61 nt, Homo sapiens
cagccccgagcagcgagacacaggcacgacgcgaaagagacgacgcagcaccaagcaggca

SEQ ID NO: 256013 - RNA, 95 nt, Homo sapiens
cgggcgcccgccggcacgccgccagccccgggggccacgagcggggaaaggagagacaagaggaagaacaagaaaggaaaagggagacaccgagg

SEQ ID NO: 256014 - RNA, 95 nt, Homo sapiens
acccagaggaacaccggagaccacgcccaaacaggaagcagagagacaagaaaacacgaaggagagaagagaagccggaaaggccgccaagaagg

SEQ ID NO: 256015 - RNA, 81 nt, Homo sapiens
cgaaagggaggcaagacaggaaggaaacgaaagggaaacaggaaaaggaaggaagaagaaagcacgaaaagaaaaaagaag

SEQ ID NO: 256016 - RNA, 78 nt, Homo sapiens
gagagaaggcacggagcaagacacgagaggcgagggacgacagagcaagcggcagagggcaagcgggaaaaagaccag

SEQ ID NO: 256017 - RNA, 78 nt, Homo sapiens
agagccccccccccaacaccgcgacacgcagcaggacagcggccgaagccagagccggggcggcgccaggccccacac

SEQ ID NO: 256018 - RNA, 83 nt, Homo sapiens
aaaacgccccggaagaagaaggacccccgcaacagaaagagccacccaaacagaacagaacaggccgcccgccgaagaaacac

SEQ ID NO: 256019 - RNA, 46 nt, Homo sapiens
gaaggaccaagaaccagcaggccaacgagcaacaaaaacgaaagaa

SEQ ID NO: 256020 - RNA, 74 nt, Homo sapiens
cgagaaaaccaaaaggggcgcgggagcgccaaaaaagagggggcgaagggaaaagccccgcaggaggccgaagc

SEQ ID NO: 256021 - RNA, 76 nt, Homo sapiens
gacccccgcccacgcaaacccaaagaccccgccggagacgagagacaaaacagaggagaccagaccagaagccccg

SEQ ID NO: 256022 - RNA, 84 nt, Homo sapiens
gccacaaaaccgcaaaacggcgggcaagagggacaaggaggcaagacgcgaagccaggcccaagacaccagcgagcccgaagac

SEQ ID NO: 256023 - RNA, 67 nt, Homo sapiens
agggaggagagagggagagccaaagaagggcacacggcacggacagggcgggacgcagaaccagggc

SEQ ID NO: 256024 - RNA, 78 nt, Homo sapiens
cgagagcgaagccgccacccaaaccagcaaaccagacaccaaaaaggcaaggacagaacccaagcaggccggagaaaa

SEQ ID NO: 256025 - RNA, 77 nt, Homo sapiens
acacaggacgagagggagagcaagaccacagcgcgcggcccccacaccacacagagagcgagagaccggaaacgaga

SEQ ID NO: 256026 - RNA, 76 nt, Homo sapiens
agagggagaaagaagcccaagacaagaccaaaagaccagcaccagacagcgaaaaagaggacccaaaaaagagaga

SEQ ID NO: 256027 - RNA, 55 nt, Homo sapiens
cgagccaacgccaggcgccgcccacagaacggccggggggcgagcgaccgaaaga

SEQ ID NO: 256028 - RNA, 38 nt, Homo sapiens
cagagcccccgcccgcaccgaacaagaggagaaaggag

SEQ ID NO: 256029 - RNA, 86 nt, Homo sapiens
acaccggcggccccaccagcagacgcagccgagacaccagcccgaaacaccaccaagaggggggcgggccgagcacccgcaggccc

SEQ ID NO: 256030 - RNA, 37 nt, Homo sapiens
ccggaagggccaccgaaggcaccggggccgagaagcc

SEQ ID NO: 256031 - RNA, 79 nt, Homo sapiens
ccccccacccacgacccccagggaccccaggacccaccgaccccgccagcagccggaaaccaggcccaagaaggaaaaa

SEQ ID NO: 256032 - RNA, 81 nt, Homo sapiens
gcacacgaaacgcggcaacccagcacccgaggacaagcgaaccggcgcggagggcaagagggagccaagaggccgaaagga

SEQ ID NO: 256033 - RNA, 68 nt, Homo sapiens
ggaacacagcaagaacagcaacccgccaggaccacgcagacccaccgggagggccggacaacagcgac

SEQ ID NO: 256034 - RNA, 81 nt, Homo sapiens
ccggcccagcgacccgaccccgcgcgacgacccgccgccgccgggcggaggaaaagaaggaggccagcgggacacacaaag

SEQ ID NO: 256035 - RNA, 56 nt, Homo sapiens
accgaagacgaccgacccgcccagcacgaccagccagcaggaggggcccgagagaa

SEQ ID NO: 256036 - RNA, 72 nt, Homo sapiens
aaaaccgccggccggaccagaccggggggaaaggcgggccagcgagccaccccccgcacacagcaagcacaa

SEQ ID NO: 256037 - RNA, 78 nt, Homo sapiens
cgacccaaacacccaacgagacgggcaaggaccaaacacggaacagggcacgcggaacaggagaggaggaaacagacc

SEQ ID NO: 256038 - RNA, 52 nt, Homo sapiens
ccgagacagaaagaggaccagaaacccgggaggacgggccgacgccacggac

SEQ ID NO: 256039 - RNA, 67 nt, Homo sapiens
aaggaaccacccaggaaacagcgcaaggcgaaccgcagaagaagacgaacagaaggaaaaaaaaaag

SEQ ID NO: 256040 - RNA, 81 nt, Homo sapiens
acccgcagagccacagggcagaggagacacaccgaagaaacaacagagagccaacagaagggaagaaggcacgcacccgag

SEQ ID NO: 256041 - RNA, 84 nt, Homo sapiens
ggcgccaggaggagggggcgccgcggcagccacccgccacccgggcacccagccccacgccagggaaccccacgccacccagac

SEQ ID NO: 256042 - RNA, 75 nt, Homo sapiens
ggcccggccccacgcgcggccggacggaccccgccaggccgcgcagagagggccgaggcagacaagggaaaggcc

SEQ ID NO: 256043 - RNA, 47 nt, Homo sapiens
cgccggagacgagagccgggccccgaggaccgagacaggagcacccg

SEQ ID NO: 256044 - RNA, 56 nt, Homo sapiens
accgggcgcgggcaaggcggggccgcaaggccaggcgcgcagaggcacccaacggc

SEQ ID NO: 256045 - RNA, 70 nt, Homo sapiens
gacagccgaaggagggcaagacagcgagggacgaaggagaccgcgcaggcaccaaggacagaacgaagga

SEQ ID NO: 256046 - RNA, 65 nt, Homo sapiens
cgccggagacagggagaccaagagacagacaccgccccgagacgagaagaaggggacccaaagca

SEQ ID NO: 256047 - RNA, 76 nt, Homo sapiens
gaaaaggccgaagaaaccaaggaggacagcggaagccgcagaaggaccggccagaagcaagccggagaacagaaag

SEQ ID NO: 256048 - RNA, 80 nt, Homo sapiens
agaacacgccccaagagcggagacacacaagggcagccaaacgagaagccgcaaggcgaaaagggaaagaaaagaggcgc

SEQ ID NO: 256049 - RNA, 82 nt, Homo sapiens
cgagccggacccagggagagcagggcagggaaaagcgccgggcggaccagcagggcggaaaacaccccaaaagccaaaaggg

SEQ ID NO: 256050 - RNA, 73 nt, Homo sapiens
aaaaacaagcaccagaggcccgagcagccagcacggagcgagacgacgggaccgaaggaccccgccagagaca

SEQ ID NO: 256051 - RNA, 75 nt, Homo sapiens
gccggcccgcgggaccgacagccgggcagaggaagcagggaggaaggcaagggaacaacacaaaaacgccgacca

SEQ ID NO: 256052 - RNA, 75 nt, Homo sapiens
accgcacgacgggacacgccagcaagacaaaacggcgcacgaccccagagccgcccaacagggaaggagacccac

SEQ ID NO: 256053 - RNA, 73 nt, Homo sapiens
gaaggaccaagaaccagccccgaaccagaagcggcaaacagcacagccagcagaccagggacacccggagagg

SEQ ID NO: 256054 - RNA, 67 nt, Homo sapiens
aaacagggcgggcaccagccggaccccaaaggcagcagcagagcgaacaggacgaaaggagaagagg

SEQ ID NO: 256055 - RNA, 73 nt, Homo sapiens
agagaccgcacccgcacaggggaggaccgacagcacgaggaggagagaagaaaagcggcccgagacaacaagg

SEQ ID NO: 256056 - RNA, 77 nt, Homo sapiens
ccgggagcagaagggaggcccaagacccacaacaaaagaacagagaagcagaccaaaggagccagggaacccgacga

SEQ ID NO: 256057 - RNA, 105 nt, Homo sapiens
ggacgaccaaaaagcagcggacagcacaaggaaccacccgcggcagagcagcggaggaacccgggggacacgcgccggaaggggcccgaagcccccgcaggaacc

SEQ ID NO: 256058 - RNA, 74 nt, Homo sapiens
cggcccggcagcaaggcgagaagaaagaggccagacaggagggaccaagaaaggcccagggaccaaagcccgga

SEQ ID NO: 256059 - RNA, 80 nt, Homo sapiens
gaacaaaaggcccggaccccccggacgacggggcgggaccggcgccaccgcaggcggccccacgccgaaaaagaagaagc

SEQ ID NO: 256060 - RNA, 78 nt, Homo sapiens
gaaacccaggaaaccgaaccagagagaccggccggacagaaacggaacacaaccgcaggcggcccagcccaaacaggg

SEQ ID NO: 256061 - RNA, 78 nt, Homo sapiens
cgggaacccgccagcaccaccgcccaaccccagcagcgagagcaaaccggcgagaagaacacaggcaagccaggagcg

SEQ ID NO: 256062 - RNA, 69 nt, Homo sapiens
gacacgaaaaaagagaaagggccaacgggaacggagggaaagcgacaaacaaccaacccacagagaccc

SEQ ID NO: 256063 - RNA, 82 nt, Homo sapiens
gcaggccgagaacacccaaggcaagaacccgaccgacggagaggaaacgcagaagagaaccagccacaggagggggaggagc

SEQ ID NO: 256064 - RNA, 74 nt, Homo sapiens
aagcagcagcaagggacccagcaggaaacagggacgaagccacgacagcagagaggagcacggcagaggggcaa

SEQ ID NO: 256065 - RNA, 65 nt, Homo sapiens
aacgcgccgcaaaacagaacgcggcaggagccgagagccagacgcacagcgcagggcgcgcgggc

SEQ ID NO: 256066 - RNA, 81 nt, Homo sapiens
gccgcgcgcgccccccgcggagcccgcgcagccgcgcagccccacgcaacgggcccgcgcgcagccccgcccgccacccag

SEQ ID NO: 256067 - RNA, 39 nt, Homo sapiens
cacccaaggccaaacagcagggacaccagggcggacacg

SEQ ID NO: 256068 - RNA, 68 nt, Homo sapiens
cagcccacaccccgacggaagagcaaggaaagcagaaggcgggaaaaagaggagcaagacagcaacgc

SEQ ID NO: 256069 - RNA, 78 nt, Homo sapiens
acacggaacgacgacgggaacgaaacgcacacccggccccagcagccacagcggaggccccaaggacacggcagggca

SEQ ID NO: 256070 - RNA, 82 nt, Homo sapiens
gaagacgaacgaaacacgaaagggcagccaagaccgaggaagggggccaggcgaccagaccggacccagcacacaagcaccc

SEQ ID NO: 256071 - RNA, 54 nt, Homo sapiens
gaaagcggaaagccaagaacagcgcgagccacaaggcaaggaagcaggcggcac

SEQ ID NO: 256072 - RNA, 70 nt, Homo sapiens
acgacggcaggggaaaaacgaggccccccaaaggcaaaagagacggacaagcaaggcaggagaaagcaag

SEQ ID NO: 256073 - RNA, 66 nt, Homo sapiens
gagaagggggagccgcaagggcccgcgggacgcgcgcaaaaccggcagaacaagaaaacaagagac

SEQ ID NO: 256074 - RNA, 68 nt, Homo sapiens
gcacaccaacgccggacagcgcgacagaggcaacagcacagaaaaagcacagaaacgcggaacagaga

SEQ ID NO: 256075 - RNA, 75 nt, Homo sapiens
ccaagaagaaaacaggacagaagagaagggaccaagagcagggagaagagggaggagagggcgaaccaaagaagg

SEQ ID NO: 256076 - RNA, 72 nt, Homo sapiens
agaaggaacacgaggcagggggccacacgcaaggggaacagaaggccaggccagacggcaaaaaggcagaac

SEQ ID NO: 256077 - RNA, 75 nt, Homo sapiens
agaaggaccaagaaccagcacgagacacgagacaggagagaaaggagagacaaaggaccagacaaaggcaaaaag

SEQ ID NO: 256078 - RNA, 87 nt, Homo sapiens
agcgcaaagcacagaaaaggaagaggaccacaccacccggcaagaacgccacacggccccgccccagaagcacacggccggacccaa

SEQ ID NO: 256079 - RNA, 64 nt, Homo sapiens
ggcacccggccaccgcgcaagacccaccagcacagggagaggaacaagcagaagaaggcaacaa

SEQ ID NO: 256080 - RNA, 39 nt, Homo sapiens
gacggcgccggcagccggaacccccggcgaaggaaagcc

SEQ ID NO: 256081 - RNA, 75 nt, Homo sapiens
cgaccacgccacccccgaaggaaccgcgaccacaggaaaagaaggaggccagcgggacacacaaagaaagacgaa

SEQ ID NO: 256082 - RNA, 85 nt, Homo sapiens
ccagcagcgcgcggagaagaacggggagccagggcggaaaacaccccaaaagccaaaagggaaaggaaaagaccaacaacagcgc

SEQ ID NO: 256083 - RNA, 105 nt, Homo sapiens
cgggacacggccacaaccaagcaaccggcacaaaggggcaggagagagaacaaaggcgcaccccaaggacacagcaagagccggaaccacaccacagaacacccc

SEQ ID NO: 256084 - RNA, 82 nt, Homo sapiens
gacagacgcaagaggcggacaggcggaacaaagaacgccaaaagacgaacacaaagggaaagaggagaggcacccgaaagcc

SEQ ID NO: 256085 - RNA, 73 nt, Homo sapiens
gggaaccggcgcgccggcgcgcggcgcggacaggcccaaacggagaaacaggcgccaaacgacagagacccca

SEQ ID NO: 256086 - RNA, 79 nt, Homo sapiens
ccgcgacagaccacaagcaccacccaggagcggcaggagccaaggagcccggggccgcgcaaaaggcagcgggggcaca

SEQ ID NO: 256087 - RNA, 72 nt, Homo sapiens
cgaagcgcaggcaaaggacccgcaggcaccagaagaagcccccgcaaccagcgacaaacccgaaggcgagac

SEQ ID NO: 256088 - RNA, 81 nt, Homo sapiens
cagggagggagcggcgggaccgggcgcagacggcgagaccccgcacaggacaccccgggccaagaggacaacaagaagcgc

SEQ ID NO: 256089 - RNA, 73 nt, Homo sapiens
cccggcaccggacggcccccaagcaccgagaggcagcaaagacagaaggcaggaaacccgcaagagaagcacc

SEQ ID NO: 256090 - RNA, 78 nt, Homo sapiens
cggccggcgacgcgagaacgacgaggacgcggcgcggcgcgcgaggcccgaggagcagagaaagggggaggcggaccc

SEQ ID NO: 256091 - RNA, 85 nt, Homo sapiens
aaaaccccgaggagcccgccaaagccccggaccgccaagaaagacggcaagcaggaaacggaggacggggaaaaaggaccacaag

SEQ ID NO: 256092 - RNA, 84 nt, Homo sapiens
gcgcccagaaagagaagacagccaggaagcggaggaaacagcggaaggaagggaaaaaagaagaacaagcgagaagagaagaag

SEQ ID NO: 256093 - RNA, 70 nt, Homo sapiens
aaccaggaaaccagaaaggcacagacaggcgagcggggacggcagagcgggccgaacccagagcgagggg

SEQ ID NO: 256094 - RNA, 74 nt, Homo sapiens
gaaaaagggaaaaggagagaaaagagcagaacgaagaaacccgcaggaccagcggaacaaacaccacccgagca

SEQ ID NO: 256095 - RNA, 71 nt, Homo sapiens
ggagaagaccaaagggaagagaaacgcaaccggcggagaaaaaacagagcggaacgagagagacggagagg

SEQ ID NO: 256096 - RNA, 72 nt, Homo sapiens
aagggcagagaaaaaagagcagcgaggcgaaagcaaccacagaaaaagcagcgaccccgccagggcgcggga

SEQ ID NO: 256097 - RNA, 47 nt, Homo sapiens
cccgggaggaccaagccgagccgccaggggccggacaccggggaaga

SEQ ID NO: 256098 - RNA, 38 nt, Homo sapiens
gccacgcaacccccccccgggcaggggcacacgccgaa

SEQ ID NO: 256099 - RNA, 71 nt, Homo sapiens
aaaacaaaaaaagaggcagcaggggaaccggaaagcgaagagcagagcaaaacgaagcgaaagcgccaaga

SEQ ID NO: 256100 - RNA, 77 nt, Homo sapiens
ggagaagcaggagagcaagcgcgcgaaaaccggcccagcgagaccggggcagagggggagcagaccggaagacccga

SEQ ID NO: 256101 - RNA, 66 nt, Homo sapiens
agaaacgcaccggaaaggccaccaggagagaacaaggagcaggccaacggccagaagaacgagcaa

SEQ ID NO: 256102 - RNA, 52 nt, Homo sapiens
aaagcgcagacggggaacgggacagggcagcgcagccaaagagcacagggac

SEQ ID NO: 256103 - RNA, 83 nt, Homo sapiens
cagagagcaaccgaaggacaaaccaccccgacccagccacaaacccccccacgacaccgaagcagcgacggcacagcgggaag

SEQ ID NO: 256104 - RNA, 84 nt, Homo sapiens
aagcagcaggaaagagcgcacggcccgcgggcagcggagaccccgccccaaccacgaccaggagcgggaaacgcagcgacagcg

SEQ ID NO: 256105 - RNA, 58 nt, Homo sapiens
cggaaaccggagcgcgcagcaggcgagaacgcggacaagcaaacaaagaggaaaaaga

SEQ ID NO: 256106 - RNA, 82 nt, Homo sapiens
ggagcgggcgcggacgccgaggcaccgaggcaccagaggagacggcccgccacgggccccgcagccgcgcccgagcgcccga

SEQ ID NO: 256107 - RNA, 42 nt, Homo sapiens
agccaccaggagcccgagagagaaggacagaagggacccggg

SEQ ID NO: 256108 - RNA, 71 nt, Homo sapiens
cggagcagaaaaccgcaacacaggaaagcagagacaagcagagcgagggagaccacaaaaggccccagcca

SEQ ID NO: 256109 - RNA, 73 nt, Homo sapiens
caaacaggacacaccacgaaggcacacacgaacacccaacacagaagagacaagaaccgcaaagaagccaaaa

SEQ ID NO: 256110 - RNA, 75 nt, Homo sapiens
agaaacagaaacagagggagaaggaaagaagaccgccaaagagaaaaaacgcgcagagccagagcgaacaaccaa

SEQ ID NO: 256111 - RNA, 70 nt, Homo sapiens
ccccaaggagcggccgcaaaaccagacgagagacagaagacgaaagggcaagaaagagagcacggacaag

SEQ ID NO: 256112 - RNA, 54 nt, Homo sapiens
gggaggcgcggccgccccgcgggggacgaaacggcgaggaaagagaggagcccc

SEQ ID NO: 256113 - RNA, 68 nt, Homo sapiens
cgagccggagaagagggggcccggggggaggaggggcaggcccggcgcgagacgacgggaccgaagga

SEQ ID NO: 256114 - RNA, 113 nt, Homo sapiens
acccccagggaaccggaccgggagcggccacgcccgggcccggcccaacaggcaggagcgccaaggccagcgccacacacgagccagcggccaaagccaacagccacggaggc

SEQ ID NO: 256115 - RNA, 120 nt, Homo sapiens
gaacggggcccgggaggcagcccaccagggaccgcccaggaaaccagcagagcccagaaagaagcggcccagcggcgcaggagccgaggaggccgggaggcgaagccaaggccccacgga

SEQ ID NO: 256116 - RNA, 70 nt, Homo sapiens
agagcgacgggacccccccgcagaaggcgaacaagaggcgccagcgggcgcgccggaagaacagcgccac

SEQ ID NO: 256117 - RNA, 82 nt, Homo sapiens
acagacggagccgccacccagagcgcacggcgacgccccaggggaaaacccccgggaccagggggagcgggccggagagaag

SEQ ID NO: 256118 - RNA, 80 nt, Homo sapiens
agaagggaaaaccagcgagggccgaaagaccagagaagccggaacaaagggccagagaacaagcccagacagcaagacgc

SEQ ID NO: 256119 - RNA, 87 nt, Homo sapiens
cacacagaaccacaggaaagcagcgaggaacacaggccaggacgaggggaagaagacagcaggcgggggcacacggcgggggaagcg

SEQ ID NO: 256120 - RNA, 84 nt, Homo sapiens
caggaccgcacgcggaggcggcgcccgcgggcaagaggccccggaaggccaggggccgcaccaggccagcccccccggacagga

SEQ ID NO: 256121 - RNA, 51 nt, Homo sapiens
cagagacacggggagaccacagacaggaccgaaccccaccaaggggaccaa

SEQ ID NO: 256122 - RNA, 70 nt, Homo sapiens
cggccgaaagaccagcagcacaaaagcgacgcccccgcaaaacggcccaacacgaagcggcaccggcacc

SEQ ID NO: 256123 - RNA, 82 nt, Homo sapiens
gcggcgggcagcccgcgggcgcccagagagaagaagaaggaggccgcggccagaaacccaagaaaaagcgaaggaacgcaga

SEQ ID NO: 256124 - RNA, 120 nt, Homo sapiens
cagaccagccccaaaacgggagaccgaccacaagaggcaacccaccccaacccaaagggaaccaggagaaagagcgcggagcaccaccaagccacaaaaaggagaaaccaccaacaaggc

SEQ ID NO: 256125 - RNA, 56 nt, Homo sapiens
cggacccccaaaaccggaaagacagcaggcaccagacccccaaacagcagcagaaa

SEQ ID NO: 256126 - RNA, 40 nt, Homo sapiens
gcagccccgacgcagccgggaagaacacgaagcaaagggg

SEQ ID NO: 256127 - RNA, 68 nt, Homo sapiens
gggaacgagccggagagcccgcagacaacggcaagcggagaagagcaaggccgaaccgagaggaaggg

SEQ ID NO: 256128 - RNA, 69 nt, Homo sapiens
agggccccacgacacaagaagcggaccaccaaccccccaggaaacaccaaccaccagccccggcgaaac

SEQ ID NO: 256129 - RNA, 62 nt, Homo sapiens
ggagcaacaaggcacggcaacaagcagcacacaaaagagggacaacacaagccacagcgccc

SEQ ID NO: 256130 - RNA, 80 nt, Homo sapiens
aaagcggagcgaggacagcaaggaggaggagaacaagcagaagcgacacagagccaccggcaaagaagagaaaaagagcc

SEQ ID NO: 256131 - RNA, 55 nt, Homo sapiens
cccaggcagaccgcagcaaaggccacgcgcacaggggcggcagggggaccagcca

SEQ ID NO: 256132 - RNA, 87 nt, Homo sapiens
gccgccgccgccgcccagagacgcgagcccgccgccgccgccaccacccacccggacacagccaccaggagagaacgccgcgccgcg

SEQ ID NO: 256133 - RNA, 67 nt, Homo sapiens
acggaacacccaagacaccgaagaggcaacagaacaagagaagcagggagagcaccaaagagaacac

SEQ ID NO: 256134 - RNA, 85 nt, Homo sapiens
ccgcgccgcgccgcaccccgagcgaccggaccacaggaagcggacccccccccaggagggccggggacgagggcgcccggaaggc

SEQ ID NO: 256135 - RNA, 78 nt, Homo sapiens
gccccccccccgcagcccggagcccgcaggacccggcccaggcaaccgagccagaaaccgcagggaggaagcgccacc

SEQ ID NO: 256136 - RNA, 78 nt, Homo sapiens
caaagcgaccagagccaaggccccaggcgcgaacccagaggcaggccccagccccagccaaaccccccacacgaacca

SEQ ID NO: 256137 - RNA, 71 nt, Homo sapiens
cacgccaaaacgaccagcagcgaaaccaaggccggggcccaagggaggggcaaaaaggaccaaaaaaagaa

SEQ ID NO: 256138 - RNA, 75 nt, Homo sapiens
aggcagcgcagagccagagaccacaggagcgagagcaaacaggaaggacaacccgggggacgccgccacgaagaa

SEQ ID NO: 256139 - RNA, 61 nt, Homo sapiens
ggcggccccggagagagagccgcgcacgcacagacaagggagcaagaggcagacagaccga

SEQ ID NO: 256140 - RNA, 87 nt, Homo sapiens
gcagggaaaccgacggagaaaccaccggcggaccgcacaagcagacggaaccaaagccgaccccgaaacagggagcacaacagagac

SEQ ID NO: 256141 - RNA, 84 nt, Homo sapiens
cggccgcgcaccgccaaagacaagaacagaggggccgagaagccaacaaaacaggaaacccaggcccaacggcaggggagcaag

SEQ ID NO: 256142 - RNA, 84 nt, Homo sapiens
cagggcgggccgcgcccaccgccagggcggagggggcagggcagaaggaccaggggcgacgaggcccagagcaagagaggcacc

SEQ ID NO: 256143 - RNA, 72 nt, Homo sapiens
aaagagcacggacccggaaggcggcccacgaacccaaagggacaagcgcccccaacacccgagccaccaccc

SEQ ID NO: 256144 - RNA, 48 nt, Homo sapiens
cacagcacgcggcaagggcgcgccagaggacaccagacccaaggcgca

SEQ ID NO: 256145 - RNA, 75 nt, Homo sapiens
ggcaaacaaggaccgggaaagaggagacaaaccccagacgcgccggagggccagagaaacccagaaaacgccaaa

SEQ ID NO: 256146 - RNA, 79 nt, Homo sapiens
gcaagaccggaccggcaccaccaggaaccacaggagcgggaagcagcacaagcgggacccaggccaccagaaagccagg

SEQ ID NO: 256147 - RNA, 74 nt, Homo sapiens
gcccccaggagcgggaacagcaccagagcgcgggcggagacccacggggagagacccagaagagccggacccca

SEQ ID NO: 256148 - RNA, 70 nt, Homo sapiens
acaaaccgcacgacacaggaaaggacaaaaccagaagcagggagaccaaacaaaccaaggcacggcggcc

SEQ ID NO: 256149 - RNA, 76 nt, Homo sapiens
gcccgacgcccagcacaggaaccggcaggagaaggggcccggcagccgcccgaaggaagcgccccgcgacagcccc

SEQ ID NO: 256150 - RNA, 71 nt, Homo sapiens
ccacgggcggcgaaaggggcgggcaccaggaaggcgacgaccgcgagaaccggggggccgaaacgccccac

SEQ ID NO: 256151 - RNA, 67 nt, Homo sapiens
ccgcgcacccacgaacgcccaccccccgaacccagccgcaccgcacacgccaaagagggcagcaccc

SEQ ID NO: 256152 - RNA, 54 nt, Homo sapiens
cgggaacggcgcggaaggagagccgacccacgaagccaaggccgagagaagacc

SEQ ID NO: 256153 - RNA, 63 nt, Homo sapiens
aacgaccgaccaacaggcgaagccgccgacccagcggaacaagaggaaaccacccgccgcccc

SEQ ID NO: 256154 - RNA, 109 nt, Homo sapiens
aaacggaccacaccccagaagcaccccgccccaaacgcccccaccccaaagcaagaccagggccacccggcgcacacccagagccggccgcacaccagagccggaccca

SEQ ID NO: 256155 - RNA, 75 nt, Homo sapiens
gccccccaccccacacacgcacgcaggagccaggcgccgggcaacgccaggccgacagcgccaccgggggcggac

SEQ ID NO: 256156 - RNA, 74 nt, Homo sapiens
aaggcgcgccgcacccgccagggagcaccgcagaaggagacgcacgaagcagaacaaaaaaaaaaggaggcagg

SEQ ID NO: 256157 - RNA, 83 nt, Homo sapiens
aacggaaacagccacgagagacgagcaacccccgggaagccaagccgcaggaaggaacaccagccagccgggaacccagggca

SEQ ID NO: 256158 - RNA, 80 nt, Homo sapiens
cggagggccgagggagggccgagccagccgcggccggaggagcccccaggccgcaggaagagacgaagagaaaaaaaggg

SEQ ID NO: 256159 - RNA, 33 nt, Homo sapiens
cggaggccaggagcaggacaggaaaagccagag

SEQ ID NO: 256160 - RNA, 74 nt, Homo sapiens
cggagcaaggaaaaaaaccccacggaagagacagagagagccaaaccccagcccagagaggaccaggaaaaacc

SEQ ID NO: 256161 - RNA, 73 nt, Homo sapiens
ggcaccggcggcgaggaaacgcccccgagaagaaggaggcgcaggaaacaggagaaccgacagaaaccccaag

SEQ ID NO: 256162 - RNA, 80 nt, Homo sapiens
ccccaccgcccgcagccacagcacagaaagaccggacacccgcacacagggaagagaaggacagaggcaaggaggagccg

SEQ ID NO: 256163 - RNA, 72 nt, Homo sapiens
caggaacgcagaagaccgcaggggaaaaccaaagaccgacaagacccaagccgagaaacaagccacccccga

SEQ ID NO: 256164 - RNA, 74 nt, Homo sapiens
ccagcggaacgcaggcgcacgacggacccagcacgaccccccaagagccgcggcccgcggcccaccggacaaac

SEQ ID NO: 256165 - RNA, 75 nt, Homo sapiens
cggcggaagaggcggccggcgaaaggagcgggccggcaagggagggcggcagccggccaggggacagacgagagc

SEQ ID NO: 256166 - RNA, 35 nt, Homo sapiens
gcgggcccaagaaaagcgcgcgaccggccccaacg

SEQ ID NO: 256167 - RNA, 73 nt, Homo sapiens
caccacagcacccgcggaggacgcacagaccggcccaggccggggaagggcaccccgcgagcagaagagccag

SEQ ID NO: 256168 - RNA, 39 nt, Homo sapiens
ccacaagggaagaaccacagcgaagccgacgagcccgaa

SEQ ID NO: 256169 - RNA, 80 nt, Homo sapiens
cgcacacaccagaacccaaagacgaccaggccggaagaaacgcggaccgcggagggccggagagcgggacccagagcgga

SEQ ID NO: 256170 - RNA, 79 nt, Homo sapiens
acaggccccccgccccccccccgcgggcaccgaggacccgcccgcccagcaagccagggcgagcaggaagaagaacaag

SEQ ID NO: 256171 - RNA, 95 nt, Homo sapiens
aaagcggggacagaagagccaaaaggaaaaaaagaggcacgaagcgccaagaagaggaaaccagaacacggcaagagcagccaccaccaaaccca

SEQ ID NO: 256172 - RNA, 52 nt, Homo sapiens
gagaggaagacacccgaccgacaaaagggccgcggccagggggacccgcaga

SEQ ID NO: 256173 - RNA, 79 nt, Homo sapiens
aaccgccgggcgccagcaacaggcacgggcaagccgggccgcgcgcgagacacgagacgaacccaggagaaacgagagg

SEQ ID NO: 256174 - RNA, 70 nt, Homo sapiens
gaccaagaaccagggagggcagaacgacgaaagacggacaggacgagggagagggcgaccacaggccaag

SEQ ID NO: 256175 - RNA, 84 nt, Homo sapiens
ccgggcggcaccgcgggcgcaagcgcaaccgcgggggcggggacggcgccgagaggcgagcacgacaccaccgccggcaccccc

SEQ ID NO: 256176 - RNA, 81 nt, Homo sapiens
cgaaggggaggagcgaccaggaagaccacgccacaaaaggggcccgaccccccgagccagggccaggcggccggccgcggc

SEQ ID NO: 256177 - RNA, 92 nt, Homo sapiens
ggaagcgacgccccggggcgggggcgaggcggcggcggcggccggagccccagccggccaggcagagcagcccaccagggaggggagggggg

SEQ ID NO: 256178 - RNA, 89 nt, Homo sapiens
gcggggggccgagcaaccagaaccggagcaggaggcgcacaacacccagaccagggaaccgggcagcagccgcagccgcccccgggacg

SEQ ID NO: 256179 - RNA, 58 nt, Homo sapiens
gcaccacaggaggggcaggaaacgaagaccgaccggcacgcggccacaacacccacca

SEQ ID NO: 256180 - RNA, 77 nt, Homo sapiens
cggacgccggaagccgggaaaggcaggcagggccaacgggggcgacccgccaggaaccaaggcacgcgcgaagggca

SEQ ID NO: 256181 - RNA, 70 nt, Homo sapiens
acaagcagaggccagcacgagacagcaaaaagggacagcagaagagcccgggaagcgcagagggaacacg

SEQ ID NO: 256182 - RNA, 52 nt, Homo sapiens
ccaaacaaccacaagcggagaaaaagccaccacaaggggacaacggagcagg

SEQ ID NO: 256183 - RNA, 68 nt, Homo sapiens
gaggggagcccgcgcccgccgcgggagagaggacccccccccccccccaagaacagaccgaccgccac

SEQ ID NO: 256184 - RNA, 74 nt, Homo sapiens
cgaaaaaggagcaaccgaggaggcaccgcgaaagaaaggaaacccccgagaagcgcaccaagaacagaaggcac

SEQ ID NO: 256185 - RNA, 56 nt, Homo sapiens
gaaaaccagccagacacaaacagccggggacccgagcgccgcagcgacccgagaac

SEQ ID NO: 256186 - RNA, 40 nt, Homo sapiens
aggaagaagccgagcaggggaagaaacgagcgagcccggg

SEQ ID NO: 256187 - RNA, 76 nt, Homo sapiens
gccgccggagcgcggagccgccgaggcccaccgcgcgaccccaaacgccgcacacagccaggaagccacagacgca

SEQ ID NO: 256188 - RNA, 76 nt, Homo sapiens
gccccagccaaaaagggcagccagcggcaccaaaccaaaccccaggcaccgaggccccaccagggcgccaggaggg

SEQ ID NO: 256189 - RNA, 76 nt, Homo sapiens
aacaaacaaacacccagaaacaagaggggaaaggagccaagcaggaacgagcgagacaaaaacacaacccagcccc

SEQ ID NO: 256190 - RNA, 60 nt, Homo sapiens
cccaacccagaccacacccgagccgagcccgacaaccgagacagcaccaggcccgaagca

SEQ ID NO: 256191 - RNA, 76 nt, Homo sapiens
ggcgcggaccggcaccaacaaaacaccgaggcacacaggcggaccgcccgggcgggccgagcggcggagggggccg

SEQ ID NO: 256192 - RNA, 76 nt, Homo sapiens
cagggccggacaccgccggagggcccgggaaggacgcaaaagaccacccacggaaacaggggagaggaaaagaaag

SEQ ID NO: 256193 - RNA, 79 nt, Homo sapiens
gaccaggacagccacacgcgccaagcaggaggggccgaacagcaagaaccggggagaccacgacgcgccccgggcgcca

SEQ ID NO: 256194 - RNA, 76 nt, Homo sapiens
agcagccacgggagagaagaacgcgcaggagccacgggccccgccagcagagcgcacccaacgcacccgcacccac

SEQ ID NO: 256195 - RNA, 36 nt, Homo sapiens
ccgcaccgggcccaggagagacagggcgccggggcc

SEQ ID NO: 256196 - RNA, 75 nt, Homo sapiens
gccagacaccaacgccaagagccaagaccggacgagccgccaacaaggagaccagagccgcgaccgagggccgcc

SEQ ID NO: 256197 - RNA, 70 nt, Homo sapiens
ggaaagaggcaaccccccacggagcagaacccgggaagagccccagggaggcccacacaaccacaggaag

SEQ ID NO: 256198 - RNA, 77 nt, Homo sapiens
cagcgcgaagcagcaaccagacgagggggaccaagaaggaacacaaaaccaaaaaccgaagaagaaaaaccccagaa

SEQ ID NO: 256199 - RNA, 72 nt, Homo sapiens
cggaacgaacaaggggcaaacccaagacggaaaaggggggaaagaaagaagcacagggggacaagacaagag

SEQ ID NO: 256200 - RNA, 70 nt, Homo sapiens
agaaacaccgaaccgccacccaggcccaagaagaaaggacaacccgacaccggaagaggagaaagcagga

SEQ ID NO: 256201 - RNA, 72 nt, Homo sapiens
gacccccccccccccccaaggaaaggcagcaacaggggaagcggagggaggcaaagaagccaaaaaaaccaa

SEQ ID NO: 256202 - RNA, 71 nt, Homo sapiens
cacagaggggagccacaccagccacacaagagaacgggccgacgacgggaaccaggacaaaccggcgacca

SEQ ID NO: 256203 - RNA, 49 nt, Homo sapiens
gcgaaaaccccggaaacccaccgagccgaggagggaagaaggcgggccc

SEQ ID NO: 256204 - RNA, 51 nt, Homo sapiens
gcacaggcggagcagcaaagcaaccgggggcgacccggaagcggaccccag

SEQ ID NO: 256205 - RNA, 71 nt, Homo sapiens
aaaccacccaaggagggaggggcagaggagaaccgacgaaccggagccacggaaagacaaaagaagaacgg

SEQ ID NO: 256206 - RNA, 54 nt, Homo sapiens
cgcagggcgcccccgacaagggccgaacaccaacagaggaagaaaggagagccg

SEQ ID NO: 256207 - RNA, 38 nt, Homo sapiens
gagcgggaagaggggcgagacgacccggagaacacaag

SEQ ID NO: 256208 - RNA, 74 nt, Homo sapiens
aagcagggccacgggaagaacccaacagaggcccgagcacgcgagccacccaggacgaggccaggccgaaacgc

SEQ ID NO: 256209 - RNA, 81 nt, Homo sapiens
aaaaacagaacaggaggggagagggcaggaaccaccgcccaaaggcaaaagcagaccggaaaacccaccggcaagaccaca

SEQ ID NO: 256210 - RNA, 71 nt, Homo sapiens
ccgcccagcccccgggagcgggacacaggaccgggggagcggccgaggacaagcacaagcagcaccaaaag

SEQ ID NO: 256211 - RNA, 72 nt, Homo sapiens
agcaaccagaaacaaaagaacaagagggaaggaagaggccacaaaagaggcgaggggacggcggggagcgca

SEQ ID NO: 256212 - RNA, 81 nt, Homo sapiens
aagacccgagccggacccagggagagcagggcagggaaaagcgccgggcggaccagcagcaggaggcaaagggaccccaag

SEQ ID NO: 256213 - RNA, 77 nt, Homo sapiens
cccaaggagcccgcaagagaagaccaagcgacgccggcaaagcggagcggaggcagacacacacggggggagaggga

SEQ ID NO: 256214 - RNA, 75 nt, Homo sapiens
ggcggcggcagcgggccagacccaggaccgcgacacaggaaagcagcgaaacgagccgaggcccacagaaagcgc

SEQ ID NO: 256215 - RNA, 53 nt, Homo sapiens
aacccgggcaagggagcacacagccgcggcagggaaagagggcccccaaggaa

SEQ ID NO: 256216 - RNA, 76 nt, Homo sapiens
aaaagagcgaaaaagacacgccgggcacagaccggacacggaagcagaacgccgggcaggaaccccgcacccacaa

SEQ ID NO: 256217 - RNA, 117 nt, Homo sapiens
ccaggggaacgcacccacgagggcccggggggcaccacgggaagacagacaccccgaaccggcgccagggacgaaaccacgcagcgacaaccggaaccagcgccagcccaccggaag

SEQ ID NO: 256218 - RNA, 88 nt, Homo sapiens
ggaagcgccgggcccgcgcgggggggagagccacgacgccgggaccgggaccgccgccgccgccgccaccaggaacccgcgcccagaa

SEQ ID NO: 256219 - RNA, 87 nt, Homo sapiens
cgaagccggaggaggcggcagaggacgccccagagcagcgcggccaggcagacccaacaccaacacgaggagaaggcagccccaggg

SEQ ID NO: 256220 - RNA, 83 nt, Homo sapiens
caaggaggacacaagggaagaccgggccgaaaagcagaagacaaccaaaacaaacgcaccccaccaagcgggggaaaacaaca

SEQ ID NO: 256221 - RNA, 55 nt, Homo sapiens
ccggggacgcgcgggagggagaggacgcagacggaaccgaccgagcagggcacaa

SEQ ID NO: 256222 - RNA, 59 nt, Homo sapiens
aacaaccaacaacgcaggggacaccaaaagaaaggaacaggccggaggggcacacggga

SEQ ID NO: 256223 - RNA, 66 nt, Homo sapiens
cagacccacaacaccaggcgccagccacaagccaggagcgccgcggcgggcccaaacgcgccacac

SEQ ID NO: 256224 - RNA, 79 nt, Homo sapiens
ccaggagacaggaggccgcggggagacgcgggggacggggcaggaccacaggaacgacagcgaaacagagaacggaaga

SEQ ID NO: 256225 - RNA, 42 nt, Homo sapiens
gcaagggggagcggcacccgagcagcaccgggcagcggcaaa

SEQ ID NO: 256226 - RNA, 53 nt, Homo sapiens
ggacaaaccaacagaagggcaaccagggggaaagagcccgggagaggcccgcg

SEQ ID NO: 256227 - RNA, 72 nt, Homo sapiens
ggaaaagagcaagcaaaaacaacagagaaagggcaaagaccagaggaagagagaagacagcagcgaacaaga

SEQ ID NO: 256228 - RNA, 60 nt, Homo sapiens
gcgcccaggccagcgccccaggccaagagggacccacccggcgaacagccagcaaagaca

SEQ ID NO: 256229 - RNA, 69 nt, Homo sapiens
aaagcggcagcaccgcaagaaggcaccggaggggccgcaagcccgaccgacccaccaaaagagcggagc

SEQ ID NO: 256230 - RNA, 74 nt, Homo sapiens
gagaccccgcccggaccgcaggcccggacggagacacacggacacccaggaggaaggggcgcgagccagcaaca

SEQ ID NO: 256231 - RNA, 75 nt, Homo sapiens
gagaaccgcagcccacacgaaacagcgacgagcagacaggacaccaaggaggcggcaggccagcgaccggcggga

SEQ ID NO: 256232 - RNA, 84 nt, Homo sapiens
gaaggcggccgaaaacgcaagaaagaaacacagacgccaagcaccgcaagggaaagggccgagaaagaagagaggaagaagagg

SEQ ID NO: 256233 - RNA, 83 nt, Homo sapiens
cgacgggcgcgcacgcacggccggccaccagcaccgcacagggcggagaacggaaaagcaccaggaagcagagaggaccgcag

SEQ ID NO: 256234 - RNA, 80 nt, Homo sapiens
ggcaccacaaaaaggacagagaaagggagacggaggacccggaagcacacaaaggcagaagagccaccacagccggaccg

SEQ ID NO: 256235 - RNA, 58 nt, Homo sapiens
gccaaaggggacagcgagcggaggaggacgaggacggaagacaaaacgggacaaagcg

SEQ ID NO: 256236 - RNA, 75 nt, Homo sapiens
gaaacgaggcgcccccagcagcaggaggacgacgacaaggcagcggaagccaaaccgaagggacagacccccaac

SEQ ID NO: 256237 - RNA, 55 nt, Homo sapiens
acccggaggccgaggaacgggccgcgaaggcgccgacaggacaagacgagacacc

SEQ ID NO: 256238 - RNA, 76 nt, Homo sapiens
agcagaggacgcggccaggcgacgggaagcgaccgcaggcgggcccccgaccgggcaacggagacagaaaccagga

SEQ ID NO: 256239 - RNA, 75 nt, Homo sapiens
gcccccaaaagcccccacgggacaagagggaggaggacaagaagagaccgaccccgaaacccacaaaccccagag

SEQ ID NO: 256240 - RNA, 80 nt, Homo sapiens
aaccaaagagaagggacaacggagagcgacccagcgacagagaaacagcaggccagcgaagacgccagaggaagacagag

SEQ ID NO: 256241 - RNA, 68 nt, Homo sapiens
agcgagggggggcgcgccggaaaccggagcgcgcagcagggggcagcggcaagcaggggagccagcca

SEQ ID NO: 256242 - RNA, 57 nt, Homo sapiens
cccgcccgcccgggacccgcggccccgccgcgacgaccaaagcaaaaaaaaggccag

SEQ ID NO: 256243 - RNA, 71 nt, Homo sapiens
gacaggaccagacccacagaagcccacacgggcacaggggccccgccagcaagggcacggggccacgccga

SEQ ID NO: 256244 - RNA, 78 nt, Homo sapiens
caggacacagcaggacagagggccccgccagcccggggcccgcaccggcccgagggccacacagggacgaaaacccgc

SEQ ID NO: 256245 - RNA, 72 nt, Homo sapiens
cgggccccaggacgcacggcagagggccccggaccaaaagcaagcccaagccacagaccaaaaagagaaagg

SEQ ID NO: 256246 - RNA, 79 nt, Homo sapiens
caccacccaccgaaacaaccaggaggcaggagcagagacagccggagcggcccaaagaaggaagcaagccaacgcacac

SEQ ID NO: 256247 - RNA, 81 nt, Homo sapiens
ggccggggcgccgccgggcggccgggcgcggcgagcccaggccggggggggcacagagccccggaagacagcccccagcga

SEQ ID NO: 256248 - RNA, 61 nt, Homo sapiens
aaaacaccccacagaacagggacaggagagagggcaagagacgacaagcagagagaacacc

SEQ ID NO: 256249 - RNA, 72 nt, Homo sapiens
gcagaacccaccgagcgaaaacagacgcgggaaaccccgagaaacaggcacaaacaaacagaggcgagaaca

SEQ ID NO: 256250 - RNA, 73 nt, Homo sapiens
ggcaaaagagaaaggacgccagacacgagaccccaacaggaccaagagagcgggaccagaccccacaagaaaa

SEQ ID NO: 256251 - RNA, 84 nt, Homo sapiens
cccacaaagcccagaagaagggcaccagcgaagagccagaccaggaccaggcggggcgaaccagcgcggaccagggagcggaga

SEQ ID NO: 256252 - RNA, 63 nt, Homo sapiens
agggcccacaccacggggacggaacaggcaccacaggaagaaccaagagagcgcgacaaccag

SEQ ID NO: 256253 - RNA, 78 nt, Homo sapiens
gaggccgaggcgggcggacacgagggacgcacaaagcccagggacccccagaccaccgggcgcaccaaggccggaagc

SEQ ID NO: 256254 - RNA, 74 nt, Homo sapiens
gaacccaccacccagcagcagggcacaagacacgaagcccgggcaagacaacaaaacccgcgggcagaaaggag

SEQ ID NO: 256255 - RNA, 80 nt, Homo sapiens
gggagagaaccagcaccgggacgcacagagaccggaagaccaagcaggagaaccgaccgccccggcgcaggaacacagga

SEQ ID NO: 256256 - RNA, 81 nt, Homo sapiens
cacgccccccggaccgccgcagccgggcccggggccgacagccccccagggggggccccagcccggccgaacgggcgcacg

SEQ ID NO: 256257 - RNA, 79 nt, Homo sapiens
gcgaaaggccgggaagagggagagcaaacggccagcccagggacagcccaccacaagcaggccccaagcccaacagaga

SEQ ID NO: 256258 - RNA, 64 nt, Homo sapiens
ccacgcgcggaaggcagcgcccagcagcgcagggaccaggaggagaagcaaccagagaggaagc

SEQ ID NO: 256259 - RNA, 71 nt, Homo sapiens
aaacccaaaccaaccccagaccggagccagacagcagccaagaccacaccggacaagcaggggagaaggca

SEQ ID NO: 256260 - RNA, 74 nt, Homo sapiens
gaagaggaggagaccaagcgcacagccaggacaaacaagaccaccagcccacaccaccagaccaaaccagcgcc

SEQ ID NO: 256261 - RNA, 74 nt, Homo sapiens
ccccagccgcggagacacaacaacagaggcagcaacgaaagcacagcgagacaagcaacggagaacgcggcgcg

SEQ ID NO: 256262 - RNA, 112 nt, Homo sapiens
gcggagcgagaccacccgaacgacgcgggcgagcggggcggacgccggggagacgcaggcgagaccccaggcagacgcaagcggaacacccccgagggcccagagagccccg

SEQ ID NO: 256263 - RNA, 63 nt, Homo sapiens
gagaggagggcggaaagccaagaacagagcccaagagaacgaaagcacagaaaacaacgcccc

SEQ ID NO: 256264 - RNA, 76 nt, Homo sapiens
aggaggcagcgcgaccccgcacgggccacgggaaacaggcacagaggcgggaagaggccacaagggagaagcgggg

SEQ ID NO: 256265 - RNA, 80 nt, Homo sapiens
gaggccgggaccgggcgggaccggagcaagcgggcgagggcagcgcccaagcagaaagccggacccacagccgccagaga

SEQ ID NO: 256266 - RNA, 81 nt, Homo sapiens
aacaccagcagggaaacgaagggcagaagacaaagcgcagaggggcaagccccagaacaagggaggcgaggacggacaaaa

SEQ ID NO: 256267 - RNA, 75 nt, Homo sapiens
gaccgaccacgggacgcagagcgcggccagagggcccgcccagccccaaccaggcaccccaaggaggacaagccc

SEQ ID NO: 256268 - RNA, 53 nt, Homo sapiens
aagcagaggaaagcgccaacggagcagaccaccgcccagcaaaaagcggcgga

SEQ ID NO: 256269 - RNA, 72 nt, Homo sapiens
ggccccgcaaccacgaaaagaggggcagaacggcccgaaacccgcacccgaaccagaaaaacagagaaacga

SEQ ID NO: 256270 - RNA, 80 nt, Homo sapiens
cagcgagagccagggcccaaagaaccgcggagacccaggaagcgcaccggggccggagcgcacgccccagccaccgcgcc

SEQ ID NO: 256271 - RNA, 63 nt, Homo sapiens
gaccggaagcagagaaagaaccagcccaaacagccagagaggaaccacacggccccagaacag

SEQ ID NO: 256272 - RNA, 81 nt, Homo sapiens
cccagcagcaggaggacgacgacaaggcaaacgcacgcgaaggggagaagagagccccccacacacccgcgcgcacgggac

SEQ ID NO: 256273 - RNA, 86 nt, Homo sapiens
aaagccaaacaccacccaacgagggaaacaaaaaaaagaccagacagagaagccggccaacggaccacaccaaaagccaccaaagg

SEQ ID NO: 256274 - RNA, 83 nt, Homo sapiens
ggaagaggaccgaaccggccgaagaggccgcaggggagagcaggccaccaggagagaacgccgcgccgcgcgacaacggcccg

SEQ ID NO: 256275 - RNA, 58 nt, Homo sapiens
gccgacagcagacacccaacggggaaccccagcggcggccaggcagagcagcccacca

SEQ ID NO: 256276 - RNA, 75 nt, Homo sapiens
caccacaagcacggaggcgcaaaaaaagcccgccgagcaccacggccaccaggccagcacggaagccccaaccgg

SEQ ID NO: 256277 - RNA, 85 nt, Homo sapiens
ccgccaaccgaggcccgcggggcggagaaacgaccgcgccgccgcgccccaccgggcaaaccgcggacagggaaccagaggacag

SEQ ID NO: 256278 - RNA, 70 nt, Homo sapiens
aggaaaacgcggaaaaccgacacaacaggagaggaggggcgggagagagagcgaccagcgaggaaggaaa

SEQ ID NO: 256279 - RNA, 53 nt, Homo sapiens
gaaaacacgcccagacgaacacaagagagaagagaccacgagggagacgacag

SEQ ID NO: 256280 - RNA, 106 nt, Homo sapiens
gccgggagacggggacagccagaaaccggggaccaacaaccaccaagaaacagagccaacacagaacaccacaccgaaagccacgggacaaaggggggcaagcaag

SEQ ID NO: 256281 - RNA, 75 nt, Homo sapiens
cggcacagcacccgggcgcggcggccagccgcaccgggacgacaccggggaccggacaggcggaggaagcagaac

SEQ ID NO: 256282 - RNA, 113 nt, Homo sapiens
gccccggccccccccagccgccgcccggagagccgcccgccgaggagcgacgcaccgcaggccagcacccgcccgaggacagagaggcgagcgcccggaggggagagagcgga

SEQ ID NO: 256283 - RNA, 80 nt, Homo sapiens
agaaccaaaggcaggacagccagcaggggcgcggcaacccccccacccagcagggcgggcggcgcggcacggccacgaga

SEQ ID NO: 256284 - RNA, 53 nt, Homo sapiens
gaagccggaaccaacagagggccagcaccccgcgcagaccccagaagaaaggc

SEQ ID NO: 256285 - RNA, 76 nt, Homo sapiens
ccgcagcaagacgggacggaaaacaccaagagaccaccgcagaaaaaggacggcagcaacacaaacaaggaaggag

SEQ ID NO: 256286 - RNA, 30 nt, Homo sapiens
cagccccagccgaaggccccaacggaacca

SEQ ID NO: 256287 - RNA, 74 nt, Homo sapiens
ggccgggagcggagcagacccccagccggcgagacagggccaggcgcaagcagcgagaggaaacacaagaagag

SEQ ID NO: 256288 - RNA, 72 nt, Homo sapiens
ggccagcgggacaggagggcaggaagagcgcagcggggacaagggccagagggggcgaccgggacaaacggc

SEQ ID NO: 256289 - RNA, 74 nt, Homo sapiens
acggaagaagaagaacagggacacccaccccccagacacacagaagaagccagggcgaccgggcaaggaacggg

SEQ ID NO: 256290 - RNA, 76 nt, Homo sapiens
aggccgcacggacggggggggggcggagaacggaaaagcaccaggaagcagagaggaccgcagaagggaaggagag

SEQ ID NO: 256291 - RNA, 46 nt, Homo sapiens
aaggagaccgagaagggaaacagcgcgacgcgaaggacgaagcgag

SEQ ID NO: 256292 - RNA, 86 nt, Homo sapiens
gcgggggaggcgagcgcgccgcccggagccgcgcacacgaaggcgaagaaggccacggcaggggaggaaaccaggccacaaaaggg

SEQ ID NO: 256293 - RNA, 87 nt, Homo sapiens
ggggaaccggccagagggaaaggaacccggcagagagggccggggcccggaccccgggcccaaggagcggacagcggggggcggccg

SEQ ID NO: 256294 - RNA, 80 nt, Homo sapiens
ccggggggcgcgcccagagccccgcgcagcccagggaagagaaccgaccacaccgggacgagccacaccgcggcacgaaa

SEQ ID NO: 256295 - RNA, 67 nt, Homo sapiens
cccaacacagcaacacccagaccagccacagaaacgaaccccaagggacacaagggccagcgaaaga

SEQ ID NO: 256296 - RNA, 90 nt, Homo sapiens
acgcagaccccagggaaccacagcccccacagcagcaggagaagcaccagcaccaagaccagccagggagacgacccgcgggaacccacg

SEQ ID NO: 256297 - RNA, 67 nt, Homo sapiens
ggaggcagccaagccgagccgccacccggcgaggcaccggggggcccacgccgcacccggggggccg

SEQ ID NO: 256298 - RNA, 76 nt, Homo sapiens
cggcaaccagccgcggaaagacggcgcacacgcacccggagcgcccaacagcggcgacccggccacgagccgagag

SEQ ID NO: 256299 - RNA, 71 nt, Homo sapiens
ggagcagggagcgcaaaagcgaaggcaccgccaccggaaaccaggaaaagggcccgagggcaggacagcag

SEQ ID NO: 256300 - RNA, 87 nt, Homo sapiens
ccggcacagagcggccaaagccacaccagggcccgcccgaccagcagacccgacagcgggaaaggacccagaagaccccaccccacc

SEQ ID NO: 256301 - RNA, 72 nt, Homo sapiens
gccaacagacagggcggaggcgccacaggagccgcagaagcaaaggcaccgccaaaccgaaaacgcgggaaa

SEQ ID NO: 256302 - RNA, 63 nt, Homo sapiens
gccacgcagcaacacccccacgcggaacacaggcaaaagggaaagcaccaaggagacagacga

SEQ ID NO: 256303 - RNA, 71 nt, Homo sapiens
ccagaaaaggcggggcaggacagaagacaaaagagaagaaggccagcgccacagccccaacagggcaccag

SEQ ID NO: 256304 - RNA, 79 nt, Homo sapiens
gacaagggaggcgccgccagcggccgggaccgaacaggcggagcaggacacgagacacaggccgcacgcacgcggggga

SEQ ID NO: 256305 - RNA, 75 nt, Homo sapiens
gccgagacgcgcgcagggcggcccgggccgcggaggcgcgccgcggcaaggcagcaccccgacgacaagacaccc

SEQ ID NO: 256306 - RNA, 72 nt, Homo sapiens
acccgggagaggagaccagaacgaacccccccccccggcacggcagacacaccgaccagaggaaggcgaacc

SEQ ID NO: 256307 - RNA, 72 nt, Homo sapiens
aacacccgcagacaccggccacccagagagcaaaaggcagcgaaacaaacaacggagggaagaccggccccc

SEQ ID NO: 256308 - RNA, 92 nt, Homo sapiens
ggggaagagcagcgagagcgcggagcgggcggagcggcgagagcccccacggggcacggcggaccccgggacgagagaccggccgggcagcg

SEQ ID NO: 256309 - RNA, 79 nt, Homo sapiens
ccgggcagaagccaggacgcccacccgccaccaaccagacccagggccgggaccgacccaggaggagccgcagccccac

SEQ ID NO: 256310 - RNA, 61 nt, Homo sapiens
aggaggcaaaccagaggagaaaacagcaccacaaggagaacacccagcaaggaaggagcac

SEQ ID NO: 256311 - RNA, 112 nt, Homo sapiens
cagcggccgcgcggcgcggacggagcagaaccccaggacgcgcccccgggagcgggcgcccagagagagaagaagaaggaggccgcggccagaaacccaagaaaaagcgaag

SEQ ID NO: 256312 - RNA, 82 nt, Homo sapiens
agagaaccggcgccgccaaacagcccagccgcgccagcgcccggcgccgcgcgccacccccgagcggaggacccacaggaga

SEQ ID NO: 256313 - RNA, 73 nt, Homo sapiens
gagcaaaaggggccccacggaggccacagccacaacaacccaggggacccccgccagcgcacagggcccgaac

SEQ ID NO: 256314 - RNA, 75 nt, Homo sapiens
cagcgcccgccgcggcccgggcccccccgccggaaacaggacagacaagcagacggggccgccacacgcccaacc

SEQ ID NO: 256315 - RNA, 81 nt, Homo sapiens
ccgcgagcagagccgcccagcccgccagcgcgccgggacgagacagaagagaggggagaagaagcccgggaagggcaaagg

SEQ ID NO: 256316 - RNA, 81 nt, Homo sapiens
gaaacaggaacaggacgacccaggagacgcaggccaaggagaaagcagggagaaccggggaccccagagccagacagacca

SEQ ID NO: 256317 - RNA, 81 nt, Homo sapiens
cggccgcgccaagcggaaagacgggccacgaggcaccggccgcgagcaccagcgccccagcacggggaacggagacaaaac

SEQ ID NO: 256318 - RNA, 77 nt, Homo sapiens
aggcgggacagcacgcaacgggacgcagaaccgaaccgagagaaggacaaaccagggaagaggcaaaacagaaaaag

SEQ ID NO: 256319 - RNA, 74 nt, Homo sapiens
aaaaggcaggacagacagcagggccgaccaagcaccgcagacccaaccccaggcgccaggaacggaggggcagc

SEQ ID NO: 256320 - RNA, 76 nt, Homo sapiens
caggggaaagcaccagagcgggaagacacaaaagaggcacggcggcagaccagaaggaaaacacaccaggcacaga

SEQ ID NO: 256321 - RNA, 82 nt, Homo sapiens
aggcgaggcggaagaaaaccaacacgacagcaaccaacggcgcggaaggaaccagcacacgcccgccccacgacggaggcag

SEQ ID NO: 256322 - RNA, 76 nt, Homo sapiens
ccagcacgccagacccgcacgcaaaggggggcgcaagacaaccagggaggcggcgccggccccgcagcgcgggagg

SEQ ID NO: 256323 - RNA, 77 nt, Homo sapiens
ggcagacccaaggcgaccccggccagagacgcgcacgaaacgacgaagaggcccgaggacagaggagcaaaggaggg

SEQ ID NO: 256324 - RNA, 63 nt, Homo sapiens
gaggagcgaacaaggcgacaacacaggacaacccaaaaggagacaggagaagaaccaagcggg

SEQ ID NO: 256325 - RNA, 76 nt, Homo sapiens
ggaagaaccccccgggagccagaccggcaccgaagacccgaagaaaagggacggccagagcccgaagaagaaccag

SEQ ID NO: 256326 - RNA, 80 nt, Homo sapiens
caagagacagcagaacgaggaagaaccggaagcccagccagggacaagcacccacagagacgcacaacgaggaaggcaag

SEQ ID NO: 256327 - RNA, 73 nt, Homo sapiens
gcccccgcagccgccgaggaagcggcgcccggcgccccccccggcggagaggaagccgaaccaagcgaaaaac

SEQ ID NO: 256328 - RNA, 70 nt, Homo sapiens
gaaggaaagcagaagccaccgggaagcaccgagaaggcagggaacagggcagcaacccgcgggccccgac

SEQ ID NO: 256329 - RNA, 41 nt, Homo sapiens
cagaaaagacaagagcccggagaccgacggcagggcaaacc

SEQ ID NO: 256330 - RNA, 76 nt, Homo sapiens
ccagcgacaagaaggaccagagaaaaggcacagaacagccccgccaagacagccacacgaacacggacccccccag

SEQ ID NO: 256331 - RNA, 79 nt, Homo sapiens
cggccagagccggcgagccggaggaagccaccagacgaaggacccaagcagagagagcagaacgccaggacaaccaagg

SEQ ID NO: 256332 - RNA, 81 nt, Homo sapiens
ggcggcggcggagacgcgggcccgagcgggccgcgaggagcccaaagggcacgcaaaaagaacagaggaacccaaggaagc

SEQ ID NO: 256333 - RNA, 113 nt, Homo sapiens
cgggacggaccgagaccggaccgagagcggaccgagagcgcgaaacgcacgagaagaggagaggagacgccggagcgggacgaccagagaccgagagcggcgcgcaccgcggc

SEQ ID NO: 256334 - RNA, 72 nt, Homo sapiens
aacccgaaggcgaacacagaggaaaccgcaccgcccggagggaccagcagaagcaccccacagcaaggagag

SEQ ID NO: 256335 - RNA, 81 nt, Homo sapiens
aaaaacacaggaagcaaaagaagaggaccacacacagaccccacacaggacaggaaaccaggaggcggcccaagaccaaca

SEQ ID NO: 256336 - RNA, 74 nt, Homo sapiens
accaccagagccggaccaggagaacggcggcgggggacggggaaagccggaaggccaacgcaagcccacgggga

SEQ ID NO: 256337 - RNA, 80 nt, Homo sapiens
cggaggagacgacaagaccgggacacccgaagcgggaaaggaggcccgccggggggcagagaagccaaccccccaagcga

SEQ ID NO: 256338 - RNA, 74 nt, Homo sapiens
gaaagacccaggaagcagaagaagcgaggagaagaagagggagaaagaagagagaccagaaacgagaggagaag

SEQ ID NO: 256339 - RNA, 71 nt, Homo sapiens
gaccggcaccgcggcaagcaccacaaaggaacgccacacgcgaaaaacgggaaagaaacgggaccaagcaa

SEQ ID NO: 256340 - RNA, 62 nt, Homo sapiens
gccgcggcggcagcagcaggagagccccaggagcccccgcgccccgccacccgggccacgcc

SEQ ID NO: 256341 - RNA, 77 nt, Homo sapiens
cgcggagggccgagggagggccgagccagccgcggccggaggagcccccaggccaacccgagccgaaaccagcgggg

SEQ ID NO: 256342 - RNA, 67 nt, Homo sapiens
gagagggagccacggcaccaagcggcgggcgcggacggcaggggcgccggggaacccgcgggaagaa

SEQ ID NO: 256343 - RNA, 70 nt, Homo sapiens
cggccaggcgacgccacccaagacacaaacggcgacacaggagaacgggaaagcgcacaagccaccgcgg

SEQ ID NO: 256344 - RNA, 71 nt, Homo sapiens
caagaacgccgccgccgcacaagagacgaaggaaaaggaacaaagcaaggacaaacacccgggaagacaca

SEQ ID NO: 256345 - RNA, 85 nt, Homo sapiens
gagcgcgaggacggcacggagcagcggggcccgggcaggacggggcggggaccaggagaggcgccaccgcccggaccgggggggg

SEQ ID NO: 256346 - RNA, 74 nt, Homo sapiens
acgccccggcaacccaggggcggccacgaccaccaggcgccaggcaagaacgccccggcaaggacggaggcagg

SEQ ID NO: 256347 - RNA, 84 nt, Homo sapiens
ggcagacagggcaaagaaaagggacgggaccaacggggaaccccgggacagagcccccacaaaaacaaacacccaggaagccca

SEQ ID NO: 256348 - RNA, 70 nt, Homo sapiens
cgcagcgagcacgcccccacaacacccaggaggcgggacagcgggagccagagggacccaaggggaacgg

SEQ ID NO: 256349 - RNA, 67 nt, Homo sapiens
agaaagacagaccggcacccggcaaccagaaacacaggccaagggcagcgaagccggccagcgcaga

SEQ ID NO: 256350 - RNA, 76 nt, Homo sapiens
cggaaccgagccccgacaggcagacgaagagagaacgccgggggaagccgaaggaacgcgcaaccagaccacaggg

SEQ ID NO: 256351 - RNA, 73 nt, Homo sapiens
gcacagagaacgaagaggcagagagcaaagaacccccaagcaggaagggaagaccgggaccaggcagcaaaag

SEQ ID NO: 256352 - RNA, 55 nt, Homo sapiens
cgcagggcgcccccgagagaggaccagaaccagaccggaaagcaccaggcaaaga

SEQ ID NO: 256353 - RNA, 78 nt, Homo sapiens
gccgacccgggcgcgggagcgcgggcgcccggggcccggagcccgcgcgcccaacagcagggaggaagcccaggagag

SEQ ID NO: 256354 - RNA, 79 nt, Homo sapiens
caggcacagagaagcgcagcgacacaggaggagacggcgcacagggcccaggaaggccggaagaagaaagacgcaaaag

SEQ ID NO: 256355 - RNA, 75 nt, Homo sapiens
ggcaggacccaacgacaggcgccccggcccaacgcggagccagacggacgcggggggccggcaggcgcccggggc

SEQ ID NO: 256356 - RNA, 78 nt, Homo sapiens
gccgcggccccaccccagcagcccagcacgcggcgccagacgaggacagccggcgcgccccgcggcgccgcggccgcg

SEQ ID NO: 256357 - RNA, 72 nt, Homo sapiens
caaaggaaaaaaagacaccaccaggagcggaacggcgacggacggggaaggggcaggagcggcggacggcga

SEQ ID NO: 256358 - RNA, 78 nt, Homo sapiens
gcggcgcggggggcggagcgggcgcggagcccccacaggcaggccgaacgaggcggggggcccgagaccacaccacac

SEQ ID NO: 256359 - RNA, 89 nt, Homo sapiens
aaggaccccgccccaagccccaccacccgcagccggggaggcaacggagcgaaaccagcgacagaagcaggccaacagaccagcagcag

SEQ ID NO: 256360 - RNA, 79 nt, Homo sapiens
gcacgggccagcgacaccgcgagcaacgcgcgggagcgaggacgacagagaccccagcagacgcaggagcagcgaccgc

SEQ ID NO: 256361 - RNA, 59 nt, Homo sapiens
ccgcacccggccgccggggccgcccagggagcagaaagcgagaaaagaccggagagacc

SEQ ID NO: 256362 - RNA, 85 nt, Homo sapiens
ggcacgcgggcaagggcaaccgcggggaagcggggcggcaccggacaccaagacggagaaagcaccgggaggaaagagagccaca

SEQ ID NO: 256363 - RNA, 78 nt, Homo sapiens
agaagagcgccagacccacagagagaacgggacccagagccccagaaagagccgacccggacgaccggagaaggagcc

SEQ ID NO: 256364 - RNA, 67 nt, Homo sapiens
gaaacaaaagcaacaaagagggaagggagagcacccaaaggaaagagacagagaccaaagaaacggg

SEQ ID NO: 256365 - RNA, 38 nt, Homo sapiens
cccgacaggggggaccgaggccaaaagaaaggaagaaa

SEQ ID NO: 256366 - RNA, 73 nt, Homo sapiens
gcgcaggaagaagaagggacacccacagcacagggaagaaggaaacggacgggaacgcggacaccggagggca

SEQ ID NO: 256367 - RNA, 36 nt, Homo sapiens
gacggggcacacaagggcagacaggcaagggacagc

SEQ ID NO: 256368 - RNA, 54 nt, Homo sapiens
cccgccgacacgccgcgaaaacaagacagccagaggcaacagcaagagaaaagc

SEQ ID NO: 256369 - RNA, 88 nt, Homo sapiens
accaccagaaggagagcacaagcccgaagacgggagaggaagaggaccgaaaagacgcggccccaaaggaaacacccgaagaacacag

SEQ ID NO: 256370 - RNA, 75 nt, Homo sapiens
gggagcgccaagggcacgggaagaccggaggggacgaagaacggcaccagggcagcgcagccccaggacggccgc

SEQ ID NO: 256371 - RNA, 77 nt, Homo sapiens
gccaggacacgagggcgacccgggggccggaggcgccaccgcgcgccgcacagcccaggccccggacacgagagaaa

SEQ ID NO: 256372 - RNA, 80 nt, Homo sapiens
gaagaccaaacaacaggcagaacacgacacagaccccggccggaacccagggagaccagccccccccacgcaccagaaac

SEQ ID NO: 256373 - RNA, 80 nt, Homo sapiens
gagcacccgagacagaagagacaccagcgcgccgggacaaagcaggagagacccgccagcaacccccagccacaacgcga

SEQ ID NO: 256374 - RNA, 47 nt, Homo sapiens
ggcacagcccgccgaacccgaaaggagacaacggcaagcggagaaga

SEQ ID NO: 256375 - RNA, 73 nt, Homo sapiens
agggcaacaccaaaaacaaaacgaaccaggacggcaagcggagaagggcagacaagacacgcagcccaaaccc

SEQ ID NO: 256376 - RNA, 93 nt, Homo sapiens
aagaacacccgaacacgggacaaaccagcaccagcgcaaacaacaccaaggccgaaagaagagaaggcgagaggaaagcaaagaaaggaagag

SEQ ID NO: 256377 - RNA, 72 nt, Homo sapiens
acaggcccgggccaaaacagcaacccaaacacagaaggagcccccaggacaggcacacccgggaaaaccgaa

SEQ ID NO: 256378 - RNA, 75 nt, Homo sapiens
aagcccacccggaaacaaacgccaggggacccccagaccaccgacagcaccaaggacccccggaacagcgccccc

SEQ ID NO: 256379 - RNA, 82 nt, Homo sapiens
ggggacccgcggaagcaacgccgccgccgccccacccggggcaggggccagggccagcaacaaggagaccgcgaaggcgaca

SEQ ID NO: 256380 - RNA, 76 nt, Homo sapiens
gacccagaccacgcccacccacccaagagagccaggccagaagcggacccagaagaggggagcagcaaggaggaag

SEQ ID NO: 256381 - RNA, 32 nt, Homo sapiens
gggacagcaggaaccagaacacagagccagag

SEQ ID NO: 256382 - RNA, 74 nt, Homo sapiens
agccaagccgagccgccacccggcggggacaaacaccaggaccagggagagggcacgcgccccggggacggcca

SEQ ID NO: 256383 - RNA, 77 nt, Homo sapiens
gccagaacacaagcaagcaagagcggccccaacgcaaaacgggccaaagcgcggggcggggcggacacacacaccag

SEQ ID NO: 256384 - RNA, 63 nt, Homo sapiens
aaagagcaaaagaaaggagcaggagaagaccagagcaaaccaggaaaaccaggagaaaaggaa

SEQ ID NO: 256385 - RNA, 67 nt, Homo sapiens
ccagccaggccccaaaaggccagcgggaagaagcacagaaccggaaaaccaagcaacgagacacacg

SEQ ID NO: 256386 - RNA, 70 nt, Homo sapiens
cgcccaaagagaccagcgccaccgacccgggagaaaagaagcagcccacgaaccccgacaacagagcaga

SEQ ID NO: 256387 - RNA, 82 nt, Homo sapiens
acaagaaaacacaaagaggcagcaaagggcggggccaaagggaacgaacgcccgcagcccgggggccgagcaggacgcacca

SEQ ID NO: 256388 - RNA, 40 nt, Homo sapiens
gcccccccgccggagccccgggaggcccgcccccccccac

SEQ ID NO: 256389 - RNA, 43 nt, Homo sapiens
ccagaggggccccggagccaggacgccccgggccgccaggagc

SEQ ID NO: 256390 - RNA, 60 nt, Homo sapiens
cacacgcgaccggcgaggcccaccaagccagccccgacaagggaccgggcgggccccgca

SEQ ID NO: 256391 - RNA, 51 nt, Homo sapiens
aacgagcggcagcaacccaacccagaggggcccgggaccgacggaagaagc

SEQ ID NO: 256392 - RNA, 85 nt, Homo sapiens
gggcaggagcgcccgcaccacaccccacccgaacgacccgcaccaacagccaagcagccgacaaacagccacccggggaggggcc

SEQ ID NO: 256393 - RNA, 81 nt, Homo sapiens
ccagaaacgcacgccccccacgacacggcgccgggaccaggagaaccaagaccaaggggggacccaccaggacacaccgaa

SEQ ID NO: 256394 - RNA, 80 nt, Homo sapiens
ggcaggacacaagcggcgagagcgccaggaacagggcacaaaggacaaccagagggaaaaaacaaaggcagcacggccga

SEQ ID NO: 256395 - RNA, 75 nt, Homo sapiens
cgggaaaccagccggaccccagcgggggaagaaggacaagaggccagggcaggaacgaggcaccggacacagggc

SEQ ID NO: 256396 - RNA, 47 nt, Homo sapiens
gcaagagcccaaacgcggccccgggagaaggccagcaaagccccgca

SEQ ID NO: 256397 - RNA, 83 nt, Homo sapiens
ccagagaggccggaggaagaccccagagggcccaggagagacagaagaacgcacccaacccagacaccagagacagaaaaagc

SEQ ID NO: 256398 - RNA, 74 nt, Homo sapiens
cacacagccacccggagccaggaaagggcgcccgcggacaggacaccgaacaggggccgcgcgagagcccaacg

SEQ ID NO: 256399 - RNA, 58 nt, Homo sapiens
aaagccgcccacccccagcggcacagggccagcagaacagagaagaccccggaaagaa

SEQ ID NO: 256400 - RNA, 76 nt, Homo sapiens
ggacaagaagggcaaagccgaagccagaagccgcagagcagcagaacagacagaaacacgaaaaccagacagcccc

SEQ ID NO: 256401 - RNA, 60 nt, Homo sapiens
agaagcaccgggaaaaaaaaaaaaagaagaaaaccgaaccaccacagagagagagaaccc

SEQ ID NO: 256402 - RNA, 80 nt, Homo sapiens
cagcgccgagcgaacagagaacagcgccggaaaaccaccaccccagaacccaagaaggcagaagccagccccgcaggccg

SEQ ID NO: 256403 - RNA, 85 nt, Homo sapiens
caagcagcgccaggaggagccaggaaggcaaggacgccaacccaccggaaagcaaacccgagagaagggggagagacaggcccaa

SEQ ID NO: 256404 - RNA, 85 nt, Homo sapiens
gcacaagaggcggcggagcggcagggcggcgcgaggaggcgcaggacagcggccgaagccagagccggggcggcgccaggcccca

SEQ ID NO: 256405 - RNA, 53 nt, Homo sapiens
ccccacgaggcggcgccgcgaaaggacaagagcaccaagagagaccaggacac

SEQ ID NO: 256406 - RNA, 71 nt, Homo sapiens
ccaggagaggagaagaaaagacgagggacaggacaggacggccagcacagaaaagggagacaagaacagag

SEQ ID NO: 256407 - RNA, 72 nt, Homo sapiens
aaaaacaaagaagacccaggcagcggcaaggccccacgggcggaggggaacaccacgaccacccggcgacgg

SEQ ID NO: 256408 - RNA, 67 nt, Homo sapiens
gggcagaggaccggaggccgggaagccaacgaccacacgcaaacccagcggggccgccccacccgag

SEQ ID NO: 256409 - RNA, 67 nt, Homo sapiens
ggccccccacagaaaaggaaagagcgcacacaagagggaagcgcaaacgaacagagaaacaccaacc

SEQ ID NO: 256410 - RNA, 72 nt, Homo sapiens
caagcaaaagggcaaacaagaaaagcgcccaggaagcggaaaaacaaaagagccgcccaacgacgccgacag

SEQ ID NO: 256411 - RNA, 82 nt, Homo sapiens
cggcggcgaccccgcggcgggcgcggagagggccccggagcggcgcggcgggccggcggcgcggcacacaagacaaaggcgc

SEQ ID NO: 256412 - RNA, 76 nt, Homo sapiens
aagaccagcgccagggaaagaagaaaaggcacacacacccgcaggagagcgccggagaaaggaagaacccagacac

SEQ ID NO: 256413 - RNA, 63 nt, Homo sapiens
gaaccacccacagaccagccggaacaagagacccgcccgagggcaacacccgagaccggcaag

SEQ ID NO: 256414 - RNA, 79 nt, Homo sapiens
ccaaaccagagggacagagccgggcccgccgaggcccggagggagagaagcgcgggccaggcacgacaccgcaacgaca

SEQ ID NO: 256415 - RNA, 72 nt, Homo sapiens
caacccacccagcccggcaggcccagaagccgaaaagcaaggcccccacaagcaacccgccacacgccaccc

SEQ ID NO: 256416 - RNA, 58 nt, Homo sapiens
cggccgccggcccaaaggagacaagcgacagagaagaagagaaccgcacgcacaggaa

SEQ ID NO: 256417 - RNA, 75 nt, Homo sapiens
aacgccggacagccacaaagacccccagacacacacacccaacccaaaccaaggcgcacggaagaccaggagaga

SEQ ID NO: 256418 - RNA, 78 nt, Homo sapiens
ggcccggaccgcccccgagcccggaggggggagaaaaggaagggaccacagaccagcacgccggcgccacgaaccgag

SEQ ID NO: 256419 - RNA, 71 nt, Homo sapiens
aagaagcaacacgagaaccaccccgacacaacaccaccaaagaagcacagacgagaaacaaggcaagaagg

SEQ ID NO: 256420 - RNA, 72 nt, Homo sapiens
ggaccagcccagggagaccagcgaagccggccgccgacccccggcaaagcaccagaggaagaggaggaacga

SEQ ID NO: 256421 - RNA, 76 nt, Homo sapiens
agagaagcagaacgcaggaggagaacgacagggaccaggaaggcacacggaccgcaaaaacaaaggaaagaaagcg

SEQ ID NO: 256422 - RNA, 58 nt, Homo sapiens
acacacggccgagcagggggagaggcaccagcaacagaccaaccgcagcaagcacaga

SEQ ID NO: 256423 - RNA, 66 nt, Homo sapiens
caagacggcgggagccggaacgggccaggaaagacaggaggagagaaagaacccacgcaggacgac

SEQ ID NO: 256424 - RNA, 80 nt, Homo sapiens
accaaagaccgggaccgggccaacagagaccgaggaagaaggcaccacgacaaaccggagccgaggggagggaggccagc

SEQ ID NO: 256425 - RNA, 80 nt, Homo sapiens
caacacacaaggaagggcaggagaccccgaaaccggagcgagacccgaagcgagacggcacgccagccgggccacggagc

SEQ ID NO: 256426 - RNA, 73 nt, Homo sapiens
gccgaggcccgacgcgggagcgcggacgagggacggaacaagggagaccaaaaaaccaaagaagagacacagc

SEQ ID NO: 256427 - RNA, 68 nt, Homo sapiens
ggccgccggacagcgcagagccaagacggagaaacaaggagaagaaccaacaacggaaaaccagcggg

SEQ ID NO: 256428 - RNA, 68 nt, Homo sapiens
ggcgcagagcaagccgacgagaagcaagaacagcaccgcccaacagcgccacacgagacaaaagagcc

SEQ ID NO: 256429 - RNA, 69 nt, Homo sapiens
gacgcaaaccccaagcaggccacacggacacccaagacaaaggaccaaagccccccgaggcaaggaaca

SEQ ID NO: 256430 - RNA, 73 nt, Homo sapiens
gcaccccagaagggggaagccgcaaaccagcaaggcccaaaaaagagaggggaacgagccccacacacgagag

SEQ ID NO: 256431 - RNA, 40 nt, Homo sapiens
aacgcagggaaacagccacagaggaaaagacaggcaggga

SEQ ID NO: 256432 - RNA, 53 nt, Homo sapiens
cagggcgggacgaggaacgaggacccagggggcagacccaaaggaaacgcacg

SEQ ID NO: 256433 - RNA, 65 nt, Homo sapiens
gccaccaaccacaaggcccgcccaccaccagcgcagcaacgcgcgagccaggcgcacaaggagca

SEQ ID NO: 256434 - RNA, 70 nt, Homo sapiens
acgaagaccacgccggccgcgaccaaggaagcacccgaaaagcaaaggcccacccaggcacagggagaaa

SEQ ID NO: 256435 - RNA, 86 nt, Homo sapiens
cagcgcggcgcggaggccaggggaggagcagcgccggcgagccgcgccgggaggagaccgccgcgagggccaaaagggcggggaac

SEQ ID NO: 256436 - RNA, 74 nt, Homo sapiens
caacccggggccccccgcccggggggccagcacccagcagcgaagagcaaaggacccaccacgagaaacaagag

SEQ ID NO: 256437 - RNA, 73 nt, Homo sapiens
cgagacggcacgagaacgggacccggccagaggaaagaacccgagacgggggcggccagccaggaagaaaccg

SEQ ID NO: 256438 - RNA, 62 nt, Homo sapiens
gcccacggcggggcgggggagccaggccacgcaccgcgcaagaggaccgaaacagcaacaac

SEQ ID NO: 256439 - RNA, 42 nt, Homo sapiens
aggacgcagcaaaccaccagaaggcgaagggagggccgcccc

SEQ ID NO: 256440 - RNA, 38 nt, Homo sapiens
ccgaacccagccgcaccggggcacagaacgaagaggag

SEQ ID NO: 256441 - RNA, 72 nt, Homo sapiens
agagcgagaccgccaacaggacaccgaagccaaccgggaggaaaagcgggcaccgacaagcacgaccccgga

SEQ ID NO: 256442 - RNA, 72 nt, Homo sapiens
gccaccgcaccaagcgagaaggagaacaaccaagaacggaaacaagccaagggcaccgagaaggagcgagga

SEQ ID NO: 256443 - RNA, 72 nt, Homo sapiens
acaccaaccaggacagaaacaacagccaccagggggaagcagaccaagaagacagaaggggcccgccaccgc

SEQ ID NO: 256444 - RNA, 83 nt, Homo sapiens
ccagggcggcaaaacgagcgggccagggcgcgaaaaaggagaccaaggaagagaagggaagcacagagcaacccgggagacag

SEQ ID NO: 256445 - RNA, 75 nt, Homo sapiens
ggcaaacgcagcacacaaggcagccccaagcaagaagaacgagacgcagagggacaaaaaaaacaaaacacgaag

SEQ ID NO: 256446 - RNA, 74 nt, Homo sapiens
cgagcagggcacacccgcgaggaaggaaagacggggccagacaaccaggaagcagggagggacgaggccgcccg

SEQ ID NO: 256447 - RNA, 65 nt, Homo sapiens
aacgcaaggcggaaaaaaacacagaagccaacacccaaccggccaggaacaaaacgacaaaggca

SEQ ID NO: 256448 - RNA, 42 nt, Homo sapiens
ccccccggggacgaggcggacaggacaaaacgaagaaagaaa

SEQ ID NO: 256449 - RNA, 48 nt, Homo sapiens
gccgccccacccggccggcacacaaccaggacaaccaagaaggccaca

SEQ ID NO: 256450 - RNA, 70 nt, Homo sapiens
aggaagagagacagagaagacgcagagggaaggagagaaggagagagacccagcccaccaaaggaagcag

SEQ ID NO: 256451 - RNA, 68 nt, Homo sapiens
agagcaccggaagcagaacagcaagcagaaacccgaaccggggccgcggaaagcgaagggggagccag

SEQ ID NO: 256452 - RNA, 76 nt, Homo sapiens
cggcccccagccgcgcccccgccgcccccgggcgcccggagccccaggacagcccaaggcggaaaagcgaaggaag

SEQ ID NO: 256453 - RNA, 71 nt, Homo sapiens
ggaagcccgggaccgaaaaaacgaagcccccccagacccaacacaccgaaaagagaagcaacgaggaccgg

SEQ ID NO: 256454 - RNA, 38 nt, Homo sapiens
aacagcagcggcagccaagaacccggccagccgccccg

SEQ ID NO: 256455 - RNA, 51 nt, Homo sapiens
aagcaggcccaaggagaaagccaggaaaggacacggaacagcccagcgaag

SEQ ID NO: 256456 - RNA, 67 nt, Homo sapiens
acccaccaagaacgaggccaggcgaggagagcgaacaaccccagaagagggaagcccacaaccaaag

SEQ ID NO: 256457 - RNA, 68 nt, Homo sapiens
ggggaccagcccagaaaacaacgaagaaaaaagcgcgcaccaggaagaaacacaaaccaaggagaaac

SEQ ID NO: 256458 - RNA, 72 nt, Homo sapiens
ggcggagcacccaccacggagggaaagaccaggcagccccagcaacaagaaaggcaaagcacggaaaagaag

SEQ ID NO: 256459 - RNA, 75 nt, Homo sapiens
ggaggggcaggaaagcagcgggaccagaaaaacacggccagaggaaggaggggcaacccagcacgacacagaggc

SEQ ID NO: 256460 - RNA, 72 nt, Homo sapiens
gcaggccgcgaaggaaacacccaaagggaagcgggagcccggggagcaagaagggaccacaggaccacacca

SEQ ID NO: 256461 - RNA, 74 nt, Homo sapiens
ggaaccaagcaccccccacgagacgcccgcgaaccggacacagacacgagagcgcaaggaagcagcaaagagac

SEQ ID NO: 256462 - RNA, 78 nt, Homo sapiens
gcaagacccagaagccacaacacagccccagggggaaagacccacaagcgagaacaagccaaagacagaccgccagcg

SEQ ID NO: 256463 - RNA, 86 nt, Homo sapiens
cagcacaccgaaaccaggagaaagaaggggcaagaggaagaagcagaagcagagagaggagcgaagaagaagaagcgaccaaaggc

SEQ ID NO: 256464 - RNA, 73 nt, Homo sapiens
cccccgaaagcgggaacaggcaggcccagaaaccaccacaagacaccccgagaaggagaaacaccaccagaga

SEQ ID NO: 256465 - RNA, 37 nt, Homo sapiens
agggccccgaaggaaccacggggaacagacaaggaac

SEQ ID NO: 256466 - RNA, 77 nt, Homo sapiens
ccccgggaagagaagacagcagagaaccacaagggagccgccaccaaaagcagacggaaaacccacggggaagacca

SEQ ID NO: 256467 - RNA, 75 nt, Homo sapiens
caagccgaaccgggagaagaccccggcgcgggaacgagcccacgagaaaaggaagaccggcggcagcagaggagc

SEQ ID NO: 256468 - RNA, 49 nt, Homo sapiens
ggcccgccgagaagccagccacgaaagaggaggcagccgccacagaaac

SEQ ID NO: 256469 - RNA, 71 nt, Homo sapiens
aagaaacagaagaaaagcccagggcggcaaagggccacagcaccaggaagaagaggcggaagaaacaacaa

SEQ ID NO: 256470 - RNA, 83 nt, Homo sapiens
agacacggggcaacgacgcagacggcagggggaaaagaccagccaagacagcgaagggccaagggccaacaacccagaagcga

SEQ ID NO: 256471 - RNA, 84 nt, Homo sapiens
acccggggaggcgcacacacaccaaagcaaaccagccagcacgggggcccagccagccagcagcgaggggggacggaggcggca

SEQ ID NO: 256472 - RNA, 80 nt, Homo sapiens
cgacgcggggccaggcaggacccaacgacaggcgccccggcccaacgaaaacggaaaaacgggagcccaagaaaccacac

SEQ ID NO: 256473 - RNA, 87 nt, Homo sapiens
cgccagcgccggccccccggcggagaagaagcgcggccgcaccggccaagggggaaaaagaagcccggcggccgggagggggcgacg

SEQ ID NO: 256474 - RNA, 74 nt, Homo sapiens
ggcggacagcagcgcaggcaaaaaacagcaacggagcaaggaaagagcagaagccaaacaggcgcgcagaccag

SEQ ID NO: 256475 - RNA, 108 nt, Homo sapiens
gcgcggcggacgagacgggaggcaaaagacgcggaccaggagagagaacgcagagaggaggaaacgccaggccaaggagggaaccccagaaggaaaacagaccacccg

SEQ ID NO: 256476 - RNA, 86 nt, Homo sapiens
cagccgccccgaagagggggacacgacccggagcacccgaccccgacccccaggcaacgcagcaaagaagcagaggagccgcagca

SEQ ID NO: 256477 - RNA, 68 nt, Homo sapiens
gcaaggagccaggaaggaggaggaaaaaaggagcaaaaggaacacagacccaggccaagccaccaagc

SEQ ID NO: 256478 - RNA, 61 nt, Homo sapiens
gggcaaggacaccacaaaagcgaaagagcaacccagccaagaagcaagagaagccaagcgg

SEQ ID NO: 256479 - RNA, 89 nt, Homo sapiens
aaccggaaggcagaggagggaccgaagggagcgagagcgcagcagcgcccggggggcacagcaaacccaagaaggcagaagccagcccc

SEQ ID NO: 256480 - RNA, 52 nt, Homo sapiens
accccaagagcgccggagacagccccaggagcccccgcgccccgccacccgg

SEQ ID NO: 256481 - RNA, 75 nt, Homo sapiens
gcaggagaacacaccaccacgccgaaaaggaaccggcccgaagccgaaagcgcggagcgggccacccaccggaca

SEQ ID NO: 256482 - RNA, 78 nt, Homo sapiens
gcagaggccacaggcaaacagcccccaggaaacgcggcgcgcgcgcgcgcgccaacaagcacaagccaggagaggcag

SEQ ID NO: 256483 - RNA, 68 nt, Homo sapiens
caagacgggaaagagccaagaagcagaagacggaggagagggacggggaagcgcccgcggggcacgac

SEQ ID NO: 256484 - RNA, 40 nt, Homo sapiens
gggcaacaacaacaaagcgcggaaaaggaacagaagagga

SEQ ID NO: 256485 - RNA, 57 nt, Homo sapiens
cggagccaggcacaagaaaaagagcacagaagagggaggagcgccaaagaaggaccg

SEQ ID NO: 256486 - RNA, 81 nt, Homo sapiens
aggccccgacgaggacaccccggacccccgggagacgacaccggggccccgcccaccccaggggaggcccaggagcgagaa

SEQ ID NO: 256487 - RNA, 63 nt, Homo sapiens
gcccaaagaggagggcgcacagcgcccgaggacagggggagcgggaagacccggacaacggac

SEQ ID NO: 256488 - RNA, 51 nt, Homo sapiens
gacacccaagacaagacagcgcaaggcaggaaggagggccccggagcagcc

SEQ ID NO: 256489 - RNA, 69 nt, Homo sapiens
gcgggcacagagcgagccacacacggggaaggcaacaaaaggagcagaaaagcgaggcaagggcggcag

SEQ ID NO: 256490 - RNA, 77 nt, Homo sapiens
gagccccccagggagcggagcgcccggccggcagcgggaaggaagccaggagggaagcccagaagacgcacaagaga

SEQ ID NO: 256491 - RNA, 81 nt, Homo sapiens
ggaaacggcaaagcgcagcccgcagacagaggggcgacgaccgcacaacagaacaacaaaggagagagcgggaagcagaag

SEQ ID NO: 256492 - RNA, 70 nt, Homo sapiens
caggccacaaagccacaggaagcccacgcgagagacggggcggaagcacggaagaaccagcagcaagaag

SEQ ID NO: 256493 - RNA, 83 nt, Homo sapiens
cgaagcccccagaaagacaccgagaggacggcaggccgcagacaggaagagagcccccgccgagaaaagacgaagaagcgcac

SEQ ID NO: 256494 - RNA, 78 nt, Homo sapiens
gcccccgagaacgggacacaggcagagcgcaaccccgcccgaagcagaaagaaaagacgcccagagaagagacacaag

SEQ ID NO: 256495 - RNA, 62 nt, Homo sapiens
caagaaaccgcccccagaacacaacagggcaaaggccccgacagagagacgaccaggaaagc

SEQ ID NO: 256496 - RNA, 73 nt, Homo sapiens
aagacagagcgggagagccggagagaaaccacggccaacaggaagaaaggacacaacggacggggcggagacc

SEQ ID NO: 256497 - RNA, 31 nt, Homo sapiens
aagacgagggcacaagcggcgaggacacgcc

SEQ ID NO: 256498 - RNA, 82 nt, Homo sapiens
aaacagaagccgggcgcggggaacggaagcggagcagggaagacggagcggcggcccgaaggagaggagcagcaaacaaaag

SEQ ID NO: 256499 - RNA, 42 nt, Homo sapiens
ccagcaagcgcaagaggagacggggagcaggccccgcaccag

SEQ ID NO: 256500 - RNA, 81 nt, Homo sapiens
gcccgccggggggcagggccacgcgcagagcccgggacggaccggacccagacacggccaccccagccgaccccgaaacgc

SEQ ID NO: 256501 - RNA, 76 nt, Homo sapiens
gaagccaaacccaaaaagagaaagacccgccaaagggcggacggaggcacccgagacgcggagcaggccgaggacc

SEQ ID NO: 256502 - RNA, 85 nt, Homo sapiens
ggacacggagacaggagcacggacccaccacagggccccgccagccccagccccggagaggagcagggacgagccggggagccgg

SEQ ID NO: 256503 - RNA, 86 nt, Homo sapiens
gcgggcgcgcggagcggcgccccgcagccgcggaccgaggcagcggcggcaccgccggccgaggaccaaagacgaccaccaaagcc

SEQ ID NO: 256504 - RNA, 75 nt, Homo sapiens
ccgaggccagagcgaaaacgaggagccggagggaaaggagcacggcgaccgaacgagaacaccccggccaacccc

SEQ ID NO: 256505 - RNA, 80 nt, Homo sapiens
gcgccgggccccgggccccgaggccccgaccgcggcggagcccgacccacccaagagcacggacagagggaagggaacgc

SEQ ID NO: 256506 - RNA, 69 nt, Homo sapiens
gacagcaaaaacaaaggagcaagagggcacccgccccgggccaccaccacagaccagacggcccgcccc

SEQ ID NO: 256507 - RNA, 114 nt, Homo sapiens
gcgcccgcgcaccgccaggcgccccgggcgcggcaaggacgagccggggcgcgaagggagcgggggcaccaccccgaggaccaaggcacccagcgccaggaaggcgcaacccac

SEQ ID NO: 256508 - RNA, 85 nt, Homo sapiens
gaggaccgaagcccggacgacgaggaaccgcccaacaggcccggagagggccccggaggccgccagcagagccgagcagcgggag

SEQ ID NO: 256509 - RNA, 73 nt, Homo sapiens
gaagagaagaagcgggaaagcaaaacaacgcaaggcgagacaaagaggcacccccacggcggaccagcacaga

SEQ ID NO: 256510 - RNA, 79 nt, Homo sapiens
cccagaaagaccgaaggggacacacccacacaacggccccaggaagcaccagcagagacgaagggacacccccggccga

SEQ ID NO: 256511 - RNA, 80 nt, Homo sapiens
ggaaagcaccccaccgccccaccgacgcaagaaagcagccccagaggaaaacaccgaaccgacgaaagaggacgggaaag

SEQ ID NO: 256512 - RNA, 81 nt, Homo sapiens
gaggaacacagcacccagacagggccacggagcccagaaagcgggaccaccgcaaagccacacccccacaaccgcagcccg

SEQ ID NO: 256513 - RNA, 82 nt, Homo sapiens
cccaccagcagacgcagccgagacaccagcccgaaacaccaccaaggaaacagcccgaacgcacagaagaaaccagcgccca

SEQ ID NO: 256514 - RNA, 80 nt, Homo sapiens
ccacgaaggaggagcccagcagccgacgaccccagcccgggggcggcgaggaggagcgggggagaccgcagacagcaggc

SEQ ID NO: 256515 - RNA, 51 nt, Homo sapiens
ggccaagaaggcagggaaagacaaggagccgggccgagaaaccgaaccaga

SEQ ID NO: 256516 - RNA, 82 nt, Homo sapiens
cgaaaaaaaagggaagaggagacaccccgggggccccgagcaaaccaggggccgacgccaccgccgagcccagaccggaaca

SEQ ID NO: 256517 - RNA, 72 nt, Homo sapiens
ccgagaaacacaaagaaccaagagcggacgggaaggaggcagaaagggagccccaagagagagggccaagcc

SEQ ID NO: 256518 - RNA, 73 nt, Homo sapiens
gagcggggcgcgccgcagagcggcaccgaaggacaggaggcaggaagggagcaggaaagcccaaaccagcaga

SEQ ID NO: 256519 - RNA, 82 nt, Homo sapiens
aacaagacgcgccgacgcgaggccaaaggacagccaagaaccaagcggacgccacagacacacaacaggcccggaaaggccg

SEQ ID NO: 256520 - RNA, 77 nt, Homo sapiens
cggaggagaccagagcaaaaaaaggcagggcgggaacgcggaagaagaggaacacaagcaccaaaccaccaaaccag

SEQ ID NO: 256521 - RNA, 79 nt, Homo sapiens
ggacccggaagagaagagggggcaagaaaggcgacgccggaccgcgaagagacgagaggggcacggaaggggagaggga

SEQ ID NO: 256522 - RNA, 74 nt, Homo sapiens
ccaaggacccccacccagcccgagagagcacagggccccccaacgggcgaccagggcccgacccgcgacggcgg

SEQ ID NO: 256523 - RNA, 78 nt, Homo sapiens
ggcggcaacaggggcgagaaaggcacggccccggacagcagcaaagaccagagcgggaacgggccacggccagcaggc

SEQ ID NO: 256524 - RNA, 62 nt, Homo sapiens
ccgagcaccggagaaaacacaaacccaggagcaccacgagcaaaggcagacaagaccagcca

SEQ ID NO: 256525 - RNA, 71 nt, Homo sapiens
agaccccccaaagcagcccggaacccccagccaggaacggcccgaaggacccgcaacaggcacgcagcagc

SEQ ID NO: 256526 - RNA, 73 nt, Homo sapiens
aagccaacccagcgccggcggaaaaggaacgaaccccacaagaaccaaggagggaccccacacgggcagcggc

SEQ ID NO: 256527 - RNA, 83 nt, Homo sapiens
aggaacaggcggcgcgcgcggcgcgggacgcgcgcgggcacccacggagccccggggcgacggccgaagcccgcagcccacgc

SEQ ID NO: 256528 - RNA, 76 nt, Homo sapiens
gcaagcgccacacccggcccagcccgccacacacccgaccgcacgcccagggagacgcagcagaccaaaaaaccgc

SEQ ID NO: 256529 - RNA, 79 nt, Homo sapiens
ggcgcgagccgggaacgcagggaaccacaacgccccaaaagagggccgaaccaccagaagaggccccccaccacacccc

SEQ ID NO: 256530 - RNA, 74 nt, Homo sapiens
gcaagcggagggcgggagcgagggcggccggcccggaggacacaggccccgaagacaaccggccccccagccac

SEQ ID NO: 256531 - RNA, 75 nt, Homo sapiens
ccacgccgcaggaggcggaggacagcccaaggcggaaaagcgaaggaagccacaagcacagcccacacaaaccag

SEQ ID NO: 256532 - RNA, 34 nt, Homo sapiens
aaccaaacagaagaagaaacccacggacggcccg

SEQ ID NO: 256533 - RNA, 75 nt, Homo sapiens
cgccaagagggaaggggacccgccgggaggacgcgagccaccaaaaccggcaaaggccgcgaggaaccacgaaga

SEQ ID NO: 256534 - RNA, 75 nt, Homo sapiens
caggagaacaaacccaggcagcccgaaccgcgggggaaggggccaaaggcggagcacacaaaaaacagcgccgcc

SEQ ID NO: 256535 - RNA, 77 nt, Homo sapiens
gaacgccacaggcccgagcagagaagacaaggaccccacaaaaagaccgacaccgcaagaccaggccgacggcaacg

SEQ ID NO: 256536 - RNA, 57 nt, Homo sapiens
aacccaaacacccggagacgaacccccgggaagcaggcgcaaaaacaggaaaacgac

SEQ ID NO: 256537 - RNA, 54 nt, Homo sapiens
ggcaaagcacaggccaagacaacgaaacggaacaacagaaaaaacaagagagga

SEQ ID NO: 256538 - RNA, 55 nt, Homo sapiens
cccaacccccaccccgcccaaggaggcccagcggacccagaagaccccagacggg

SEQ ID NO: 256539 - RNA, 107 nt, Homo sapiens
gcagcgagggcccggcgaggagaaccaacggcccgaaagagcggagcacacagaagccgcgcagacacaccacggcccgagcccagggccgaagcaaaagccaggag

SEQ ID NO: 256540 - RNA, 74 nt, Homo sapiens
ggcgggcggaacgacccagaaccggcgagagacgacgccccagagagcacagaccagagcgagaacaccaagag

SEQ ID NO: 256541 - RNA, 80 nt, Homo sapiens
accggggggcaggaggcacccggggcaggggacacgagcagcggaccccgcggccggacccccgcaccggccaccacgcg

SEQ ID NO: 256542 - RNA, 73 nt, Homo sapiens
aagaaccacaagcaagaaacacaggagcccggagagacccccagcagaggcgaaaaagcgacagaaaacaagc

SEQ ID NO: 256543 - RNA, 72 nt, Homo sapiens
acccccaaaagcaaagacggaaaacacagccccgcgagggggccaagcgccaggagcaccacccgaccagcc

SEQ ID NO: 256544 - RNA, 54 nt, Homo sapiens
gagggagcgcagcacagcggggggaggaggggagagagggaagacgacccagaa

SEQ ID NO: 256545 - RNA, 59 nt, Homo sapiens
ccgagaagcgagagaaagagccccgcaccacaaccgaagaaaaggagagaggcagacca

SEQ ID NO: 256546 - RNA, 61 nt, Homo sapiens
gggcggccacacgacccacccaagcccacgaggcgaacagccaggccgcagacagcaccca

SEQ ID NO: 256547 - RNA, 67 nt, Homo sapiens
cgcgacgaacgcaccgggcgaagaaaccacacagcgggaacggagagcaacgccaacaaaaagaacg

SEQ ID NO: 256548 - RNA, 78 nt, Homo sapiens
gcaaaccgagacaagcaccccgaagcgccgcaaaacaaacggagagaggagggagaaacaaaggccaaagacgcagga

SEQ ID NO: 256549 - RNA, 79 nt, Homo sapiens
ggccagggcagaggcgaagggcgggggcgagggcccgggacagcgcacccacacagggaccagcaaagagagggccaag

SEQ ID NO: 256550 - RNA, 33 nt, Homo sapiens
gggccaggaacaacgggaacggcgagggaaccc

SEQ ID NO: 256551 - RNA, 79 nt, Homo sapiens
gcgcccgcggggagcaccgcaccgccccgggacagggcaccaccagcagcagcggccacagagcagcagagaagagcaa

SEQ ID NO: 256552 - RNA, 82 nt, Homo sapiens
cagaggagcgcaaggaccaagagggcggagagaagagggcagaaagccgcggcggcgacaagacggcggagagagacgcggc

SEQ ID NO: 256553 - RNA, 75 nt, Homo sapiens
cggaaccacacacaccacaggaagccagacccccaccccccccacgagcgcccccaggagaaagaaaaaagaaaa

SEQ ID NO: 256554 - RNA, 78 nt, Homo sapiens
ccgggcgcgccgcaccccagcagcacccaagcaggggagcggaagagcccagaggaagcgaccaggcccggcagaagg

SEQ ID NO: 256555 - RNA, 74 nt, Homo sapiens
caaacagggacgacacaaaggcagcagcgggacaagaaaagaggacccggaaggccagacaggcccaggcgccc

SEQ ID NO: 256556 - RNA, 71 nt, Homo sapiens
cggggcccgcggaaaacaggcgccccggcagacggccccgacgacccaagccggccccggcccaacggaca

SEQ ID NO: 256557 - RNA, 78 nt, Homo sapiens
aggaggcagcaggaggccagcggcaagcggccgcagacacagaaaacccacacccaaagccgcagaaaaagccagaaa

SEQ ID NO: 256558 - RNA, 76 nt, Homo sapiens
gaagaggaagcaaagccaaggggcaagacgccaagagaaaaggcgagagcacaaagcaccaagagccgagaagccc

SEQ ID NO: 256559 - RNA, 65 nt, Homo sapiens
gaagccccggaggcgccccagccaagcccgggcaacccagggggcaggacgaccagcgggaggcc

SEQ ID NO: 256560 - RNA, 74 nt, Homo sapiens
gcaaccggaggaaggagcggccaagggaggccgccagccgaggcgaggagcgggggagcggcgccaaggagccg

SEQ ID NO: 256561 - RNA, 72 nt, Homo sapiens
gcccgcccacccagggccggaaaagccaacgccggcgaaggacaaagcccacaaacgcacgcaagagcagac

SEQ ID NO: 256562 - RNA, 53 nt, Homo sapiens
ggccaccacagaaacaaaagcaacaaagaggaccgcagcagcgaaaaagaagc

SEQ ID NO: 256563 - RNA, 75 nt, Homo sapiens
gaggccccagaacaccggccggcgcggaagaggccggcggcgggacggccccacgggacccgccccgaccacagc

SEQ ID NO: 256564 - RNA, 75 nt, Homo sapiens
ggccggcgggcgggggccccgcgccgcggccgagcagcggcgggaggccaccgccccaccagcaggcaacgccac

SEQ ID NO: 256565 - RNA, 76 nt, Homo sapiens
acaccaggagagaagcgacagccgcagggaccgggagaggggacgaaggcgaaccagcaagacaaagcaacaaaag

SEQ ID NO: 256566 - RNA, 72 nt, Homo sapiens
cgaagcgggagagcccgccaggagggagggacccagcagagaacaaaccaggggagggaaacgagaaaaacg

SEQ ID NO: 256567 - RNA, 80 nt, Homo sapiens
gcagcggacacgggagcaagaggcgaccgggcaggcaaacggccgagcgaccaggagaggagcccccgcccgaagaccgg

SEQ ID NO: 256568 - RNA, 65 nt, Homo sapiens
gcacacccaccgaaacaagacaggaccccaggagcaagcacaagcaaaaccacacacggaagccc

SEQ ID NO: 256569 - RNA, 78 nt, Homo sapiens
agacccaccaagaacgaggccaggcgaggagagcgaacaaccccagaagaggggagcgaaaggccgacagcagggccg

SEQ ID NO: 256570 - RNA, 77 nt, Homo sapiens
gagacagaaaaaccccagcggccgaacagaggcccaaccacagcacgggacccaaaaccagaggggagaaacaaaaa

SEQ ID NO: 256571 - RNA, 76 nt, Homo sapiens
ggagacggcgagcgcggcgcgccgagaaagaaggagaagcaggaccaaaggagacccagccaaaaaacagagccac

SEQ ID NO: 256572 - RNA, 78 nt, Homo sapiens
gccccggggacgagccgccacaccagccgcacgcgcgggacggagccagcgggaaggagaaaccaagaagcacgaaga

SEQ ID NO: 256573 - RNA, 75 nt, Homo sapiens
gcgaaccaacggagcggggcaggggcgacgagagcgcgcggacaggaaaaacaagggaggacagagcagggaaag

SEQ ID NO: 256574 - RNA, 76 nt, Homo sapiens
ggggcccagaaaacaagccagcagggagagaacagcacacagaggcgcaaggggaagagaaaagacagaagcacca

SEQ ID NO: 256575 - RNA, 79 nt, Homo sapiens
ccgggcccaggccccggcagcgccgggacaagggagcgaccggagagagccgaggaaagacacaccggcacgcccgagc

SEQ ID NO: 256576 - RNA, 75 nt, Homo sapiens
cccccaaagcgggaacaggaaaccacaaacgaaaacagaagaaggcaacccgaggccaaaaagacaggaaaagag

SEQ ID NO: 256577 - RNA, 63 nt, Homo sapiens
ccggccgcgcccgcggaaccagaccagagagggccgaggcagacaagggaaaggccgcgcagg

SEQ ID NO: 256578 - RNA, 73 nt, Homo sapiens
gcaaacggagccaggcacaagaaaaacacagacgcggccaaccacccaaagaggagcaaccaaggggaaagcc

SEQ ID NO: 256579 - RNA, 122 nt, Homo sapiens
ccaagacggcaaagcacccagccgcagcgccagcagcggacaggcacagacaaccaggcaacccagaggaagagcaaagaaaagagaagagcagcaagcccaggccagcggcgaagcagggg

SEQ ID NO: 256580 - RNA, 55 nt, Homo sapiens
ggccccccagccgggaacgagagcacccagggaaaggagacaaggaccgaaacag

SEQ ID NO: 256581 - RNA, 67 nt, Homo sapiens
aagcaagacggaaccacagacaaaaacccaaagcagaaggagaggaaaagcagagaggggcaccacc

SEQ ID NO: 256582 - RNA, 76 nt, Homo sapiens
aaaccccccaccccaacgggccccagcgccaaccaaaccgaaagccagaagggagaagagccaaggagaccaaacc

SEQ ID NO: 256583 - RNA, 77 nt, Homo sapiens
gagaaccccgcacggcggcggcccgcaccccgccccccgaccacccagcgccccgagaaccaagaacggaagaccag

SEQ ID NO: 256584 - RNA, 77 nt, Homo sapiens
ccaccaagacgcgcccagcggacgcaagaaagaagcacagcggcgagcggagccggggaggcgcgcaccggaggacc

SEQ ID NO: 256585 - RNA, 85 nt, Homo sapiens
agacccccaccaagcagagcgagggcagcagaaaaccaggcccgaaggaacagcagcccaccgccccacagacgcacagccacca

SEQ ID NO: 256586 - RNA, 71 nt, Homo sapiens
gaaagacacgggcaacaggccagaacaggccgcccgccgaagaaacacaagagcaagagaaacaacagaaa

SEQ ID NO: 256587 - RNA, 72 nt, Homo sapiens
agcagcccggcagacgcagaaccaaagcagagacgcggggcaacaaggagaaagggaaccacagcgaccaga

SEQ ID NO: 256588 - RNA, 28 nt, Homo sapiens
gccccaggaagcccggacacaagagggc

SEQ ID NO: 256589 - RNA, 88 nt, Homo sapiens
caccggccccaacgcacagccagggagccaagcgccgcccggcccccagcgcagcccagcaggggcgcgcagcagcagcagcaacagc

SEQ ID NO: 256590 - RNA, 59 nt, Homo sapiens
cccgcgcaggcgcgcggccgcagaggaggggacacaaaggaagaggcagccagacagca

SEQ ID NO: 256591 - RNA, 70 nt, Homo sapiens
ggcaacaacacaaccggacacagggacacaggaggaccacaaccagaagacgggggccacccaggccgga

SEQ ID NO: 256592 - RNA, 81 nt, Homo sapiens
cgccggacaagggaggcggaagaaggaaccccgaagaggggagaaagaacccaagggccgggcgcgggccacgccgaaccc

SEQ ID NO: 256593 - RNA, 75 nt, Homo sapiens
gacggaagcaaggaacaaaccgaagaacagcgggaaagaaggcaaaacacgggaccaggcacagacaccacgaac

SEQ ID NO: 256594 - RNA, 62 nt, Homo sapiens
gcgggacgaggaccgagaccgcggccgggaccgaggggaggcaccgccccaacccccccccg

SEQ ID NO: 256595 - RNA, 57 nt, Homo sapiens
gagcaacaacggagaaaagaagacgacacaggcagaccccggaagggcccagcaggc

SEQ ID NO: 256596 - RNA, 83 nt, Homo sapiens
cgggcggccggccgacccccgcgcgacggcgacgcgggaggccagaaccgacagagcaacacgcccacaacaagcggacaccc

SEQ ID NO: 256597 - RNA, 54 nt, Homo sapiens
gcaaggcggcgcgcccaggagaccaaaccgaggcgcggagcacacagaaacgca

SEQ ID NO: 256598 - RNA, 73 nt, Homo sapiens
ggacagagaacacaaggcccagccacccacgcacccgcggccaaaacacgacaggggccaggacaacagagag

SEQ ID NO: 256599 - RNA, 58 nt, Homo sapiens
cgcgaccacagcagcgaccgaagggaagagaccgggagccggcaagagccgacggaaa

SEQ ID NO: 256600 - RNA, 76 nt, Homo sapiens
cgggacgcgacgcgccccgcccccccgccggcccccccacgcaacggggcggcacacaaggagcgaagggcaggga

SEQ ID NO: 256601 - RNA, 79 nt, Homo sapiens
gcaacaccaaggcacaccaccccagagacgccggggcccggcgccaccaccggggagccagagcaagaggccaaggccc

SEQ ID NO: 256602 - RNA, 69 nt, Homo sapiens
aaggacggggaccgcacacccaaggagcggcagcccacaagcaggaagaccagccccaggagggaaaca

SEQ ID NO: 256603 - RNA, 70 nt, Homo sapiens
gagggggcgacccacacaggacagagagcgccccagcgaacgcgaacaacaaagcaacaagagaccccgg

SEQ ID NO: 256604 - RNA, 82 nt, Homo sapiens
gcagcccaaccccgggccaggcagaaccggccacacccaggaccggaacacccccacagacccgagccaggaggggcggaga

SEQ ID NO: 256605 - RNA, 91 nt, Homo sapiens
ccggcacaccccgaggaccgccgggcccgggaaccggaaagaccaggagggggccccggcgggccgggccgagcgcagagcgccgggcggg

SEQ ID NO: 256606 - RNA, 75 nt, Homo sapiens
ccgcgccgcgccgcccaggagacagagaggaaaacccaagacaaggaagggcaaagcccacagcacaagaggcgg

SEQ ID NO: 256607 - RNA, 74 nt, Homo sapiens
ccccaggcggaaccgccgggccccgcaccccgccaaggcagccggcacccgcacaacccagggggccgaaccca

SEQ ID NO: 256608 - RNA, 67 nt, Homo sapiens
gggcggccacgcgggaccaccggcaccaccaaagaggcacccagacacgagaggcgagggacgacag

SEQ ID NO: 256609 - RNA, 77 nt, Homo sapiens
ccgagcgacgcaccgaggggcgaccaagcacgccaagccaacccagcgcggaaaaacaagccagaagaagggagacc

SEQ ID NO: 256610 - RNA, 58 nt, Homo sapiens
gaagaagaagagaggaggcgaggacggcaaccagaacaaagacaggagggcaggaagg

SEQ ID NO: 256611 - RNA, 75 nt, Homo sapiens
gaccaggggcgagagcgggcaccccccaaacgacgcagccacggagaggcacaagggcggacccgacccgagagg

SEQ ID NO: 256612 - RNA, 66 nt, Homo sapiens
cccaagggaaaggagaaccagaaaacacgcaagacgaagagagaaaggcagggcaccccaccacag

SEQ ID NO: 256613 - RNA, 78 nt, Homo sapiens
gaaggaacgcagaagagcacaggcgagaagaaagaggaacgagcagagcgacagcgaagcgcagcaacacaagcccca

SEQ ID NO: 256614 - RNA, 71 nt, Homo sapiens
gaacagacaacacacccaagagcgaacccgagccagcggaaacagaagccgagaaacaagccacccccgaa

SEQ ID NO: 256615 - RNA, 79 nt, Homo sapiens
gccgccccccaccgcccgggcccgaggaggcagccaagccgggccgcccgcggcccacaagccggagaccccgaccccg

SEQ ID NO: 256616 - RNA, 87 nt, Homo sapiens
gagcgcaacagcagcaccaggagcgaagaagcaggggagaggccgagcgaagaaccagcggccaaggaggccagaccaagaccagga

SEQ ID NO: 256617 - RNA, 39 nt, Homo sapiens
gaagaggaagaggaacgcagcgcagaacgggcacggagc

SEQ ID NO: 256618 - RNA, 66 nt, Homo sapiens
gagccgaaacccgaccccagggaggagaagcacggccacacaggccagggggcagaacagggaagc

SEQ ID NO: 256619 - RNA, 74 nt, Homo sapiens
acagaacgaagagaagaagcgaggaaccagcaagacgaagaccagacgaggacccccggaaaacaggaacccag

SEQ ID NO: 256620 - RNA, 80 nt, Homo sapiens
gacaacagcggagccccccccaacgcaagagccgcagagaaagcgcgcgacggacacccaaggaggacagcgcgggagcc

SEQ ID NO: 256621 - RNA, 70 nt, Homo sapiens
ggagccggagagaaaggccacacgacaaggccgacgcgcacgaacacgggggcaaagacagggagagagg

SEQ ID NO: 256622 - RNA, 72 nt, Homo sapiens
cgcaggagaccacgcagaggacagcccggccgcgcgcacccggaccgccgcgccccccaacgaccaggcccc

SEQ ID NO: 256623 - RNA, 69 nt, Homo sapiens
ccgaacgaccgccgcggcggggcccaaacagcagaggggcagccgccccacccggcgcgagagcaggga

SEQ ID NO: 256624 - RNA, 85 nt, Homo sapiens
caggagccccacggagcgcgcggagcgaacccaccccagggcgcaagccccgagaaccaagaacggaagaccagcccggacccaa

SEQ ID NO: 256625 - RNA, 91 nt, Homo sapiens
aacccgccccgcccaaaagaccaccgcccaacacaacacgcagggggaacaagcaagaaaagccccagaagggccgaaccgaaacccaagc

SEQ ID NO: 256626 - RNA, 75 nt, Homo sapiens
aggggaaaggaacacccccagcggccaggaacacagcacccacccacacccacacccgcgacgggagggaggagc

SEQ ID NO: 256627 - RNA, 77 nt, Homo sapiens
cagaaagcaacggagccacaacgcacaacccaggaaaacccaaagaaccaaaggaagcccaaagcccagccgacacc

SEQ ID NO: 256628 - RNA, 80 nt, Homo sapiens
gcgcccgggcaccggaccgacgggcacaagccaggaggagcccggaagcaggcaggcagggccaacgggggcgacccgcc

SEQ ID NO: 256629 - RNA, 71 nt, Homo sapiens
aagaaccagaacagcagagcagaaaccgggggcccacaacagacccagagcaggacggacaccgaaccggc

SEQ ID NO: 256630 - RNA, 88 nt, Homo sapiens
ggcgacggaccgcggccaggagccgcaaggaggaagccggcgggacagaggaggcgccccgcggcaccagcacgcacgggccggccgc

SEQ ID NO: 256631 - RNA, 108 nt, Homo sapiens
cggacggcccggaaccggcaccagggagcgggggagacacagaaagagaccgggagcgaaggcaaacgaacacgcgcagcgcagaggcccggcagccccaaggaacgc

SEQ ID NO: 256632 - RNA, 67 nt, Homo sapiens
ggcccccaggccccacagagacaggaaggcacaacgaccggaagaaacagcccaaggaaaggcccag

SEQ ID NO: 256633 - RNA, 77 nt, Homo sapiens
ccaaccccaacccggagagcggcgagaagccgaggccgccagcgccaagaaaaaaacaaggccaaagccagccccag

SEQ ID NO: 256634 - RNA, 60 nt, Homo sapiens
ccggacgagcgagcaagaaaaaggagcagcacgccaaacaagaggaacaagaagaggaag

SEQ ID NO: 256635 - RNA, 80 nt, Homo sapiens
gacccgggaggaccaagccgaagaccaggaaggcaaggaagaaaggaaaaccaagcggcaaacacaggaggacgccccag

SEQ ID NO: 256636 - RNA, 83 nt, Homo sapiens
cccgaggcggcgagagaggcaggcggagccgaccgggccagcgccacgcagagccccgccaggaagacacgccggggaacgaa

SEQ ID NO: 256637 - RNA, 70 nt, Homo sapiens
ccccgaaggaagaacaagggaaagccagaggcacaaggagccgcaccgcgggccagaggcggaagcaacg

SEQ ID NO: 256638 - RNA, 41 nt, Homo sapiens
gcgggcggggcggcggcgcgacagagcccagcaagaccacg

SEQ ID NO: 256639 - RNA, 71 nt, Homo sapiens
gaaaggcaaagagacacgcgaggagcaaccaccagacggcaggaagcaaaagccagaccaggggacgaggg

SEQ ID NO: 256640 - RNA, 59 nt, Homo sapiens
aaccccacaggcacgccgaaaccgcaaaccccaaaggaaaggaacaccacagaaaaagc

SEQ ID NO: 256641 - RNA, 74 nt, Homo sapiens
ggccacaggaacaagaaccagggagaagccgcccgaacaccagcccgggcgcgccaggcacagccaagagcgga

SEQ ID NO: 256642 - RNA, 41 nt, Homo sapiens
ccaccaaaccgcccgagggaccagagcacgcagccccgaag

SEQ ID NO: 256643 - RNA, 52 nt, Homo sapiens
gccgagggcaggggaacccaggcaggaacgcaggaagaagagagggcgaagg

SEQ ID NO: 256644 - RNA, 80 nt, Homo sapiens
agcggaccccggacagcgagagccagagagaacaccagaaacccggcggaccccgaaggcggccggagaaccagggaccc

SEQ ID NO: 256645 - RNA, 74 nt, Homo sapiens
agaacgacagaacaaggaaaagggacgaacggagaaggaaggccgcaagcaagaggcagaccgacacaggagac

SEQ ID NO: 256646 - RNA, 77 nt, Homo sapiens
cgggaacgagggcgagcagaggacgacaggccgggaggagagaaaaaccagcagagccagcggcgaaaagcgaagca

SEQ ID NO: 256647 - RNA, 71 nt, Homo sapiens
gggacacccaacaggacggcccaaaaccagccgacaaagagggggcccaagaaggccccacccggcaaccc

SEQ ID NO: 256648 - RNA, 72 nt, Homo sapiens
gagcccaggagcgccacgcgcggaaggcagcgcccagcagcgcaggcggaggacccacaggagaggcacagg

SEQ ID NO: 256649 - RNA, 88 nt, Homo sapiens
ccgagcgcgccgccgccgccgccagaacaaccgggcgccgacgagacggagcgagaagaggcgacaccagggcccaaagaacaaccga

SEQ ID NO: 256650 - RNA, 69 nt, Homo sapiens
caacagcaaaaacggagaaacagagcaagcggaagaaggagcaagacagaaaagagacaacgcccagcg

SEQ ID NO: 256651 - RNA, 75 nt, Homo sapiens
aaaaggagagacgccagaagcaagggggacgccccccccccggcagggcccccaggggacccacggacgccaccg

SEQ ID NO: 256652 - RNA, 73 nt, Homo sapiens
accaccgaagaccacaagcaggccccgggagcaagcggggacggcgcggccaggggaggagccgggaacagcc

SEQ ID NO: 256653 - RNA, 77 nt, Homo sapiens
agaacgcgcgcccgacgcccgcaggcccgcgggcgcaccggcgacggcagcgaagccacagacggcggcggcagcag

SEQ ID NO: 256654 - RNA, 79 nt, Homo sapiens
cacgcacaccagaaagccggagcagaaggaaaaagagaacagaggagagaggacgcccaaaacagacacagggccaaaa

SEQ ID NO: 256655 - RNA, 80 nt, Homo sapiens
agaagcaccggggaggacagaccgaaggagaaagacagcaaagaaaaggagaagaaaggaaaaaaacaaccccgggcacc

SEQ ID NO: 256656 - RNA, 75 nt, Homo sapiens
ggacgcggcggcggcggacaaggagcagcgacccgccgggcccagggccccagggacggccaagaagaggcgagc

SEQ ID NO: 256657 - RNA, 88 nt, Homo sapiens
gccaccgagaccagagaccaggcccagaaggcagacgaggcagaacagagaagaagaaacaaaagacgagccccagaaaagggcgcgg

SEQ ID NO: 256658 - RNA, 76 nt, Homo sapiens
gaccggagcaaccccgaggggaagggaagcccccagaacgggacgaaaggagaaggccaccagccacgagcagcga

SEQ ID NO: 256659 - RNA, 59 nt, Homo sapiens
gcccacgcagcaagagcagcgcagccgcgagggcaaagaagggccacgggggacaacaa

SEQ ID NO: 256660 - RNA, 56 nt, Homo sapiens
agagaggagaacgaacaccggaccgccaggccggagcgcgaagacgcagggaaagc

SEQ ID NO: 256661 - RNA, 64 nt, Homo sapiens
gacacccaagacaagacagcgcaaggcaggcaacaccgggcgcgcacagaagggacaacggagg

SEQ ID NO: 256662 - RNA, 47 nt, Homo sapiens
ccagccccgacagcgggaaccggaaagcaacggcgcaagcggcggcg

SEQ ID NO: 256663 - RNA, 83 nt, Homo sapiens
agaaagaagacccagagaaaaacgggagagaaagggaaggaaaagaccaagacccaccccaaagggcaagggcgcagcacgca

SEQ ID NO: 256664 - RNA, 80 nt, Homo sapiens
aaagggaaccaaaagaggaccaccaagcccaaagaaccccacacgggacaggcgaagcacagcaaacaaggcaaggcaga

SEQ ID NO: 256665 - RNA, 75 nt, Homo sapiens
gaaccaacgaaacaccgcaggaaaaaggaaacgacccggacagccagagccagagcccagaggggagcagaggga

SEQ ID NO: 256666 - RNA, 108 nt, Homo sapiens
gagccaacgagaccagcagcagagagaggcaccccagagggcagcccacacaaaaaacggaccgaaacaaaggaaagagacccaaacagaccacagcgacgaaggacc

SEQ ID NO: 256667 - RNA, 72 nt, Homo sapiens
acgggcgcggagccggccccaggcagcgggcggcgccagcggagaacagcccgaccacgcgcgccgggagac

SEQ ID NO: 256668 - RNA, 69 nt, Homo sapiens
ccgggcgcggggccaacagcggaacccgacaagcagaccggaagaccgacggaagaccacaccccgagg

SEQ ID NO: 256669 - RNA, 83 nt, Homo sapiens
cggcaggcggccgccgcgccaccaccgggcgccgaggggcgacgaaacaacagacagcagcgcgccagcaggagaaagcagcg

SEQ ID NO: 256670 - RNA, 68 nt, Homo sapiens
caggcggcgcccggaaaccgagacgggcccgcgcccgagcgcgcagcaaaggcaccgggaaccccaag

SEQ ID NO: 256671 - RNA, 109 nt, Homo sapiens
cccgcgcgcccccgggccagcagcccggcccccgggggacaacaaccggggaccggaggacccccaacgccccacagaggaggggcggcaggccacggggaccagcgcg

SEQ ID NO: 256672 - RNA, 39 nt, Homo sapiens
ggaggaaaacaaccgagggcagaaggaagaaaggagccc

SEQ ID NO: 256673 - RNA, 61 nt, Homo sapiens
cagccgagcggggccggccacagggacaagagaaaaaaagggcgggcgaacaaaaagagca

SEQ ID NO: 256674 - RNA, 59 nt, Homo sapiens
caacgccccggggagaagcgagggacacgagaaaaaaccaccaagaaaaggacacgcag

SEQ ID NO: 256675 - RNA, 75 nt, Homo sapiens
aaaaaagacgcaggcgacaaaagaaaacgacggaccagaggcccacgaaagaacaagcgggaaacggagccacca

SEQ ID NO: 256676 - RNA, 75 nt, Homo sapiens
acaagcaagaccagggccggaggaaacagccgggcccacacaccagccagaggaaaaacagaacccaacaaacca

SEQ ID NO: 256677 - RNA, 73 nt, Homo sapiens
ccgagacaccaagggcggggcgaggaagagagccaccgagcgaagacccgagaacaagacgccgggcaggccc

SEQ ID NO: 256678 - RNA, 83 nt, Homo sapiens
cgagagggcacgaccaaccggcagacagggagcggcacagacaacgggcgaagaggggccagagcggaccacaccagaaaaag

SEQ ID NO: 256679 - RNA, 54 nt, Homo sapiens
aaggggaaggggaaagcaacgaaaagagaacagagaccacaccgcgccagaccc

SEQ ID NO: 256680 - RNA, 53 nt, Homo sapiens
accacaccaagacaccaggggagaccgagaagagaaaagggaaggcacggagg

SEQ ID NO: 256681 - RNA, 68 nt, Homo sapiens
aggggggccccggagagaaggcagacggaacagaagaaagaaggaggccaagaccaaaaacaagagga

SEQ ID NO: 256682 - RNA, 86 nt, Homo sapiens
ccaagaccacccccggcaggcccaccaccgcggcaacggaccgcggcagaagagggagacagcccgacacacacacgcagagagga

SEQ ID NO: 256683 - RNA, 57 nt, Homo sapiens
cgaaccaaagagcagcaggagacagacaagggaggcgaggacggacaaaaggaaacg

SEQ ID NO: 256684 - RNA, 72 nt, Homo sapiens
gagagcccccaggggagccggcggaagaacaagcagaaagcacgaacaacgagaacaagacacgagcaaacc

SEQ ID NO: 256685 - RNA, 61 nt, Homo sapiens
agcggccagggcggagacaaggagcacagcaaaggacagccggaaacagcgggggggccca

SEQ ID NO: 256686 - RNA, 58 nt, Homo sapiens
ggaaaacaaaagcgcacaggaagaacaaaggcaaaccagccggcgggcgccacaacgg

SEQ ID NO: 256687 - RNA, 63 nt, Homo sapiens
ccgaggaccggcaacagggcggcggggaaaaggacggggcgaggacgcaaccaccaccgaccc

SEQ ID NO: 256688 - RNA, 51 nt, Homo sapiens
ggaaagcccaagaggagacgaccacaggagaaaacgacgcccacaccaacc

SEQ ID NO: 256689 - RNA, 78 nt, Homo sapiens
acagaaaaagacgaagaagaagcccaagaaaagggcggaaggcagaaagcagagcccagccacagagcgagaaggaaa

SEQ ID NO: 256690 - RNA, 53 nt, Homo sapiens
cagcaagacggccgcgcggcccgcagggaagcagggaagacaccgagggaaga

SEQ ID NO: 256691 - RNA, 71 nt, Homo sapiens
gcaacagccgaaggcgaccccgccagaacacccaggcgacagagcccacgagaaaaggaagaccggcggca

SEQ ID NO: 256692 - RNA, 114 nt, Homo sapiens
gcaaggcaagaccgaacagaaggaacgacgcggaccagaagccagagcgaggacgccggcagcggccgggacccaacagacagagcaggcaagaacccgaaaggaagaacagcc

SEQ ID NO: 256693 - RNA, 72 nt, Homo sapiens
ggcgccaaaacgagacggaaagagacccagggcgccaaaaacagagagaaaccgaagaaggcccacacacac

SEQ ID NO: 256694 - RNA, 72 nt, Homo sapiens
caccgaagccgaccagaagaagccagcccggagcgggcacaggccaggaccacaaaacaaaccacccaacac

SEQ ID NO: 256695 - RNA, 65 nt, Homo sapiens
gggcccgaccagcccggccgcgagacaggacgacccggacaaccacccacaagcggccaggcgca

SEQ ID NO: 256696 - RNA, 65 nt, Homo sapiens
caaggaagaaacccccagccgacgcccgcgccccccagcaagggaccccgacggagagacaaaga

SEQ ID NO: 256697 - RNA, 64 nt, Homo sapiens
cccgggcccaaccagcccagcgcgcggccccaccgggaagcgcaagaaagcacagagagccaaa

SEQ ID NO: 256698 - RNA, 72 nt, Homo sapiens
aagaagggagacagaaggaaaaaggggagaaggaaccagacagcccaacaacagagggcgggaccacggagc

SEQ ID NO: 256699 - RNA, 79 nt, Homo sapiens
cgccgcgcagcccaggacgcggccgcacccggccggggaacaagaccaggaggaaagcagcacaaccgagagaaaacca

SEQ ID NO: 256700 - RNA, 75 nt, Homo sapiens
agcccgaggccaggcgccggccggcgcgaagacgcgggggccgccccccggaacaggcccaaagacgcacccaca

SEQ ID NO: 256701 - RNA, 49 nt, Homo sapiens
caccagcaagaagagcgccagccccggagaaccccaacccaaacgaccc

SEQ ID NO: 256702 - RNA, 40 nt, Homo sapiens
accgcaccaaggcgcccaagaaggcggggcaaggcggacc

SEQ ID NO: 256703 - RNA, 79 nt, Homo sapiens
caaaaccggagacaaaccacaaaaacaaaacaagcgcccaaaacgcgcggggaggggagaggcacacgaaaggacccac

SEQ ID NO: 256704 - RNA, 79 nt, Homo sapiens
cggggagccccgcgccacagggccgagaagaagcggggacggcaaaacagccaacggaacaccaaggaaaaagaagaac

SEQ ID NO: 256705 - RNA, 76 nt, Homo sapiens
aaggaggccgcacccaaggccgcagacaaggccccggccggaggcaggacagggggacggcagcagcagcgggagc

SEQ ID NO: 256706 - RNA, 73 nt, Homo sapiens
gcccagccaagccgcacacgcgagggaaacccagagccaagaggaacccagaagcagacggggccaccgcgcc

SEQ ID NO: 256707 - RNA, 75 nt, Homo sapiens
aacagagggcgaccagaaaaacaaaaaggacgaccagagcaacagggccaaagggggacgggaggagcgccgagc

SEQ ID NO: 256708 - RNA, 76 nt, Homo sapiens
ccccaagggcgggaacagagcgcgcaaaaaccagcgggcacccggaaaagcaagggaccaggcccagagccgacgg

SEQ ID NO: 256709 - RNA, 66 nt, Homo sapiens
cgcgcaccccggaccaccccaccagagccaggggacccaagggagagagggaacggcgaaagggca

SEQ ID NO: 256710 - RNA, 87 nt, Homo sapiens
gccggcccccccaggacaacccagaggcaacaaaggcgagggagcagcagccccgagaaggaagaggaggaagcgagggcccgcgag

SEQ ID NO: 256711 - RNA, 74 nt, Homo sapiens
accaccacagggaaaaacccggacacaaccagagggaagcacgcccgggcacagcggaagagacgacggaacag

SEQ ID NO: 256712 - RNA, 82 nt, Homo sapiens
ggaagaagggagagcagaagccgcgaaaaaggggggccgagcccgggcgcgccaggcacagccaagagcggaccggcagcgg

SEQ ID NO: 256713 - RNA, 71 nt, Homo sapiens
ccaccaaagacagaggaaacacagggcgccggcgaaagcaacgaagggacgccagaacaagagaaggagag

SEQ ID NO: 256714 - RNA, 89 nt, Homo sapiens
ccagcagcgggcccagacgcgagacgccgccgccaccagacgccgagcgagcgccccggaggccggcgggggaagaggcccagccaccg

SEQ ID NO: 256715 - RNA, 55 nt, Homo sapiens
agcaccggaccagcggagcggccgcgcggagccagcgcccggcaaggagcgagcg

SEQ ID NO: 256716 - RNA, 80 nt, Homo sapiens
gacagggacaggacagcgagcgaggacgaggaacggcgaaacggcgaggaaagagaggagccccggaaagaaaaggacag

SEQ ID NO: 256717 - RNA, 59 nt, Homo sapiens
agccgagaaaggaagggcgggaccaacagggagccagaacaccaagacggacaccggag

SEQ ID NO: 256718 - RNA, 88 nt, Homo sapiens
gacagccccaggagccggggccgcagccaccaggacgcaaaggagggcaagcaggcggaccgcccccggcgaccccacaacagggcag

SEQ ID NO: 256719 - RNA, 63 nt, Homo sapiens
agagagccgccaccaaacgcaggaaagcaacaaaaagcacccgaaaaggacaagcagccgagc

SEQ ID NO: 256720 - RNA, 70 nt, Homo sapiens
gcgaggacccggccacaaaagccaccgaagagagaaggccacgcccgaccccaagcaacaacggggcagg

SEQ ID NO: 256721 - RNA, 107 nt, Homo sapiens
gggcccaagggcgggaagggaccacccaggaaggagcggacacaagaagccccagggcgcaggggacaggaagaccgacggacaaacgacggaggaacaggcgaaga

SEQ ID NO: 256722 - RNA, 33 nt, Homo sapiens
ggacccggacaccaaaagggagggcaagcagaa

SEQ ID NO: 256723 - RNA, 108 nt, Homo sapiens
gcgagacgagacacggcagcaggcgcgcgccccccgagcaggaggggagcgcggcgcacccgcgcgcagcagcagagagcgaccgggagcgccgcgcagcgagcgagc

SEQ ID NO: 256724 - RNA, 37 nt, Homo sapiens
cagcgaaaaccgaagaaccgagccagcagaagagaca

SEQ ID NO: 256725 - RNA, 79 nt, Homo sapiens
gcccggcagcgccgggagccgagggccagagacaaggcgaaaaccaaagcagcgagagaagagacgcccggcaaacaag

SEQ ID NO: 256726 - RNA, 61 nt, Homo sapiens
ccccacagaggggcgacggagccgggaaaccgaagaaggcagagaaggcaaacaggaggcg

SEQ ID NO: 256727 - RNA, 78 nt, Homo sapiens
cgagcacagagggccccagagggcaggcagacaggaccgccgcggcacaccggaagccacgcggagcaggcacacggg

SEQ ID NO: 256728 - RNA, 74 nt, Homo sapiens
cagaggcggagcccgcagaccgcagaaggccggagacaccagcaggaaggagacccaggaagaaagggcgaagg

SEQ ID NO: 256729 - RNA, 83 nt, Homo sapiens
agcggaacaccccaacgggagacaagaagacgccaacgagcggcgcggacggcgcgcggacaccagggacgggagcagcggaa

SEQ ID NO: 256730 - RNA, 71 nt, Homo sapiens
cagagaacaagacggacgcaccgacggaacggccacgagcagggaggcaagaaccacaacaaccagccaaa

SEQ ID NO: 256731 - RNA, 77 nt, Homo sapiens
acaaacggccaagaagggccaccccacagacgagcaagaagcccgaacgccaacccggccagaacacgaagcgacgc

SEQ ID NO: 256732 - RNA, 76 nt, Homo sapiens
ggagcagggcagcaccacgagccagaagcagagccgaccggaaacaggcacagaacagaaggaaaggacgaagagc

SEQ ID NO: 256733 - RNA, 80 nt, Homo sapiens
gaccacggaaaaggaacagagccaaaccagaagaggagggcccagaagaaaaagagaaaaacggacagccccaggaggaa

SEQ ID NO: 256734 - RNA, 64 nt, Homo sapiens
agaccggaccgagagcggaccgagagcgcgaaacgcacgagaaggccagagagcacaagaagaa

SEQ ID NO: 256735 - RNA, 74 nt, Homo sapiens
acaccgagcacgagcgcgccaggaacccagcagacccgcgggaagacccagaggaaaccaggccccaaacgggg

SEQ ID NO: 256736 - RNA, 77 nt, Homo sapiens
ggaacaggcacccgccaccagcccgacaaaagaagcagaagaaggacaccccacaccgaaacagaccccagagacag

SEQ ID NO: 256737 - RNA, 73 nt, Homo sapiens
cgacgcagaagacagggacgcaccgacgaggacaccccccaggcacagccacaccccagcggccaaggacgaa

SEQ ID NO: 256738 - RNA, 72 nt, Homo sapiens
aagaggagggcccagaagaaaaagggacaaaggaaaaagaggaggaaaacagcagggacgaacaaaagcgag

SEQ ID NO: 256739 - RNA, 78 nt, Homo sapiens
gaccacaaggaaagaggaggaggagccccccccagaagagaggggaaaaagacagacgggaggagaagaaaaccaccc

SEQ ID NO: 256740 - RNA, 51 nt, Homo sapiens
cgacccgagggagcgaacggagaacaggaggcccggacccccagcacaagc

SEQ ID NO: 256741 - RNA, 70 nt, Homo sapiens
cccgagagcgagaacagacagaagacccgacagcccaggagcccgccgacagaaggggaacggcggagcc

SEQ ID NO: 256742 - RNA, 72 nt, Homo sapiens
cacaccgaaacggaaagaaacaggagacaggaggaggcaaaacagacagaacgcagaaagcaggcaccgaca

SEQ ID NO: 256743 - RNA, 77 nt, Homo sapiens
gagcaacgcaccccacagcaaggggaagcggaggcagggagcaagcgaaggaaacccagaaacgcgcagcagcacag

SEQ ID NO: 256744 - RNA, 74 nt, Homo sapiens
gcggcggcccaacaacagccggccggggcgggccacgggagccgcacgcagaaacgaagcccgggagaggagac

SEQ ID NO: 256745 - RNA, 70 nt, Homo sapiens
cagagcacgcaaaggggaggggaagggccgaaacagacaaccgagaggccacacgcacagcaaggaagaa

SEQ ID NO: 256746 - RNA, 60 nt, Homo sapiens
ggacgaaggggccgaccccaggccagcccgcgggagcgccacacagagcggaagaaccga

SEQ ID NO: 256747 - RNA, 109 nt, Homo sapiens
ggcgaacgcacaaggaaacacgacacaaaaagcaagcgggccaccacagaaaagaaccggagcgggaaaaaggccagaacgaagaaacaaagaaaagccagaagggaac

SEQ ID NO: 256748 - RNA, 85 nt, Homo sapiens
gcgggagccggcggcgagcggcaggagcggcaagcaagaaccccccgcagccacaccagaagcgaagagcagggaacggggggca

SEQ ID NO: 256749 - RNA, 82 nt, Homo sapiens
aaaacagcggagcgcaaaggcagagcaagaggcgacgcaagagcggagggacagagcagcaagagaaaacagagaaaccagg

SEQ ID NO: 256750 - RNA, 78 nt, Homo sapiens
gaaagagcaaaggaggggaaagaggggggcgcagccagaacaccaacgccacacacgggaccaccacacgcgaccagg

SEQ ID NO: 256751 - RNA, 84 nt, Homo sapiens
cgcccaggccgcccgacccaaagggaaaacagaaacaggaaagccaggccagaagaaggaaggccggggaggggacaggaaaga

SEQ ID NO: 256752 - RNA, 76 nt, Homo sapiens
agggaggagacccgaccccagaagcgccaaggccaagaagaagaggagagggcagagaagaaagagaaaaacgaga

SEQ ID NO: 256753 - RNA, 68 nt, Homo sapiens
ccccgacccagacagccagaaacggcggcgggccggacccggcaggacaggagcgaaggaaaaaacag

SEQ ID NO: 256754 - RNA, 74 nt, Homo sapiens
ggacaaaaaaagccgccgaaggagaaccgaaacagagccacaacagaaacacgccggggaggccgagccccgac

SEQ ID NO: 256755 - RNA, 92 nt, Homo sapiens
ccaaggaggacggcggacacggccagcgaggacagcccgagcgggaagaagccgcagcaagccgcagcggcgcgcaccgggcggcccaggac

SEQ ID NO: 256756 - RNA, 102 nt, Homo sapiens
caaaccgcacaacacagcccaccaacgaggcgccacgggaagccagccgagaacaaggggggcggacgaagcaggacacaccgaacacgcacccgagccacc

SEQ ID NO: 256757 - RNA, 82 nt, Homo sapiens
gcaacaccagacaccaaggacagcccgcaaggacagggaacaaaggcagagaaacgcaccccagagcaggacacaagacaaa

SEQ ID NO: 256758 - RNA, 79 nt, Homo sapiens
gaccgccacaacgggaccagccggggggcgccccggcgcggccaggccgcgccgcgaacggggcgcgaaagacacggac

SEQ ID NO: 256759 - RNA, 74 nt, Homo sapiens
acggagaggaaaacccaaaaaaccggcgcacaacaagccaggcggcagacaaacggaaccaaccaaagcaaaac

SEQ ID NO: 256760 - RNA, 76 nt, Homo sapiens
agggccaaggagagacagaagggccaagcccacgcagagcaaagagaccacagaggaaacaggaaaccggaaagag

SEQ ID NO: 256761 - RNA, 71 nt, Homo sapiens
gagcaacagggcagaaaaccagccccaggaggggacaaaaccccgaaaaaggcgagacagaacagacagaa

SEQ ID NO: 256762 - RNA, 75 nt, Homo sapiens
ccaggcgccgacaggaacgggagacggaagacaagaagccaaagagcggaggcggcccgcgggaaagcgcacggc

SEQ ID NO: 256763 - RNA, 75 nt, Homo sapiens
aaagaacagagaacaaggccaggaagaccagagaagagggagcaccaagaggaggcaacccaggcaagacaaaac

SEQ ID NO: 256764 - RNA, 76 nt, Homo sapiens
cgacccgggacgcccccgccagccgagcccccgggccgacggaacaagaaggagcaacaagaggaacccggaaacc

SEQ ID NO: 256765 - RNA, 60 nt, Homo sapiens
ccggggcccgaagcggggaaggggacaagaggacaccgaacgaccaggagggccggagga

SEQ ID NO: 256766 - RNA, 108 nt, Homo sapiens
cggccccgacgacagcgggccgggaaaagggcacgaggccggaaccgcccagccccgggacgcaccaaagaagacagacacgcagaaaaggagccggaccccagggcc

SEQ ID NO: 256767 - RNA, 66 nt, Homo sapiens
aaccaacagccaaacagcacaagaagggcacacacgaccaaccagcagcaaggggacggaaagaaa

SEQ ID NO: 256768 - RNA, 82 nt, Homo sapiens
caggacccgccgcggagcaggaaagcagagcaccaagacgcggggaggaggaggaggaagggagcggcagcaggaaggagac

SEQ ID NO: 256769 - RNA, 66 nt, Homo sapiens
aacacaccgccaccgaagacgggccccaacacccagagacgaaaggaggcagaaggcaaagcaagc

SEQ ID NO: 256770 - RNA, 84 nt, Homo sapiens
ccagcgcagagcaggcggagcccaagccccagcccccgggcgaggcacaccccggagccaggagggaagcccggggcggcgacg

SEQ ID NO: 256771 - RNA, 71 nt, Homo sapiens
acacacgaccagacggcacccccaagacaaccaaagggcagaaagcaccgacaagcaggcaggggcagaag

SEQ ID NO: 256772 - RNA, 43 nt, Homo sapiens
gaccgcccaaccgcgacgccgagacggagccgccgcacccagg

SEQ ID NO: 256773 - RNA, 77 nt, Homo sapiens
acacacccaggaagcagccagaccaagaacaaccgcggacacggagaggaagggcaggagaggccacggacaggaaa

SEQ ID NO: 256774 - RNA, 78 nt, Homo sapiens
cgcaaggaggaacgagagagcgccagcgccacacgagcccaggcacaggcacgcagagaggagaaaaggcgaccgaac

SEQ ID NO: 256775 - RNA, 67 nt, Homo sapiens
gagaagaagaccacaccaggagaggaggaaaagaagccgagcaccaggggcgacaccacggcaaaag

SEQ ID NO: 256776 - RNA, 76 nt, Homo sapiens
ggacaggggcagggggaaggagaccgaaaagaccgaagaaacggacgaaaccccgcccggccgccccgcgagcccg

SEQ ID NO: 256777 - RNA, 72 nt, Homo sapiens
agagacccggccaaaacacagcaagacgggacacgcagaccagcggacccaaaaacaaggaacacccggcag

SEQ ID NO: 256778 - RNA, 51 nt, Homo sapiens
cccgggacagcacgccccggaccccaaacaacggcaagcggagaagagcaa

SEQ ID NO: 256779 - RNA, 65 nt, Homo sapiens
aaaaggagaagccagcagaagaacagaacgaagggcacacgaacgaaaggaaacacaggcccaag

SEQ ID NO: 256780 - RNA, 82 nt, Homo sapiens
ggccgagcaggcgagcgaacgacgggagagccggggagacaggagagccgcccagaacccccggaagggaccagcgcaaaga

SEQ ID NO: 256781 - RNA, 80 nt, Homo sapiens
agcgaaggcacagcacagaacaaaaggaacaacagacaaaacagggaaaaggccacccagggaagaccacaacaagcaag

SEQ ID NO: 256782 - RNA, 65 nt, Homo sapiens
gaggggacgccacgcaacgccgcgccagccgcagccggcggacgcacccaccagcaagggacaag

SEQ ID NO: 256783 - RNA, 83 nt, Homo sapiens
gccaaggaccccaagcccgagaagaccggcggccaacacagccacggacaggaaggaacgcggccacgaaaaacgaaaaaagc

SEQ ID NO: 256784 - RNA, 80 nt, Homo sapiens
ggcgcgccccggggccgcggggagccacggcggagacccccgccccaacgagagcccaagagacacaggcagaagaagac

SEQ ID NO: 256785 - RNA, 65 nt, Homo sapiens
gaacgccgccgggagacccagccggcgggcgagcaggaacagaccggccccccaaacacccgagc

SEQ ID NO: 256786 - RNA, 64 nt, Homo sapiens
gagaaggaccaagaaccagggaccaggaggagaagcaaccagagaggaagcgagacccaaaagg

SEQ ID NO: 256787 - RNA, 72 nt, Homo sapiens
caccaaacgcacgagccgaccacagagccggaggagccaccaacagaagcaggagccaggaaaccaaaaccc

SEQ ID NO: 256788 - RNA, 60 nt, Homo sapiens
ccgcccccgcaggaccagaaggcacacaccggaacccaacagagccacgaagggggagag

SEQ ID NO: 256789 - RNA, 77 nt, Homo sapiens
gcacggagagaccgcaggcaaaagcagaccggaaaacccaccggcaagaccacacccgaggggagcccaggacacca

SEQ ID NO: 256790 - RNA, 50 nt, Homo sapiens
gccgcaggaaaccaaggcagggggaaagaggccccgggcagggagggaca

SEQ ID NO: 256791 - RNA, 73 nt, Homo sapiens
aaccagcaccggacagaggcaaacaaagcagggccacaaacaaggggcaagaagcaagaaacacagacacccc

SEQ ID NO: 256792 - RNA, 62 nt, Homo sapiens
cagaagacagcgggaaagcccggcccaaggcaagacagaaagcggaaggaaaggaaggaaac

SEQ ID NO: 256793 - RNA, 59 nt, Homo sapiens
gacccgacgaagcccacgccgggacccagcgcagaacaaaaagcacccgacaagagcaa

SEQ ID NO: 256794 - RNA, 77 nt, Homo sapiens
cgagaccccgcggaacgcccaccgcggagagcagcacgaccccagcacagacccgacgggccccacaccgggcgcca

SEQ ID NO: 256795 - RNA, 82 nt, Homo sapiens
ggagcgcgaaggccgggacccggccccggcccacaggggggggcaaacccgagagaacggaggcagggcagcaccagagcaa

SEQ ID NO: 256796 - RNA, 39 nt, Homo sapiens
agagaagaacagcacaggacaggcccgagagaagaaaag

SEQ ID NO: 256797 - RNA, 56 nt, Homo sapiens
ggcaaaaccccaggagcagaagccgcaaccgcaggcccacgccaaaaagggaaaaa

SEQ ID NO: 256798 - RNA, 60 nt, Homo sapiens
cgcgcccccgcggcggaggggggggcacccgaggaggaagagggcagggcccacggaaag

SEQ ID NO: 256799 - RNA, 72 nt, Homo sapiens
gggaagccggacccgccagagggacgacgggagaagggagaacaagaacgggcacggagagaggggcgccgg

SEQ ID NO: 256800 - RNA, 78 nt, Homo sapiens
aagaagacacaaaggacggaggcacggagcagaagcacaagcagaggaagggagccagcaaacgagggcaggaggaac

SEQ ID NO: 256801 - RNA, 54 nt, Homo sapiens
aacaagaccgacccacaaggccgcacaccagcaccagaagaaaggagagagccg

SEQ ID NO: 256802 - RNA, 68 nt, Homo sapiens
agcccgaagacagaccgagaggcccgaagaggcaacaaaagacaccgagaggaacacacccggggcca

SEQ ID NO: 256803 - RNA, 48 nt, Homo sapiens
gcgcagggcacaccagggacaagcaaggggccaaggagccaaggagga

SEQ ID NO: 256804 - RNA, 78 nt, Homo sapiens
cgacggcgaccaagcccgacaggcagggggacggcggccaggagcgaaggggggggaggcaccagcggggcgggggcc

SEQ ID NO: 256805 - RNA, 80 nt, Homo sapiens
cgaccgcaaccccggaggacggcgagaaggcggcgcgcgaggcaagcgcgcgccgcaaggccagcaggcaacacgggaga

SEQ ID NO: 256806 - RNA, 86 nt, Homo sapiens
ggaagacccggaaacaggggccacggagccacggccacggccgcaaggccagaccaggagggccggggacccagcagcacagagac

SEQ ID NO: 256807 - RNA, 80 nt, Homo sapiens
gcagggaacaagcgggacaagcccgggaacaacacaccagagccacgcagaggaaggcagccccacagaaggaaagacag

SEQ ID NO: 256808 - RNA, 82 nt, Homo sapiens
gccgcacccaggagagacccggaaggccaaaggcgcgcaaggaggaagaccccgggcggggaagggccggccacggccagga

SEQ ID NO: 256809 - RNA, 71 nt, Homo sapiens
agaggaggacccaaaaggacagcaaagcaagccaagagggcccagccaagaagcacggcaagagcagaaac

SEQ ID NO: 256810 - RNA, 100 nt, Homo sapiens
ggagcccgcgcagcgccccgcagggcgaggacggccgaaccccgcgcccgcaggacgccccagccagaggagggaggagagccgcagcccccgggacagg

SEQ ID NO: 256811 - RNA, 73 nt, Homo sapiens
ggaaccacaagcaaaagccagagaagcaagaggcagacagaaggacagagaagaacccagaaaaaagcaaggc

SEQ ID NO: 256812 - RNA, 79 nt, Homo sapiens
gcgagacccaccgcaggacccacagagaagcgggaggcccgccagcggcagccagaagaacaagcacccaagcaggacg

SEQ ID NO: 256813 - RNA, 89 nt, Homo sapiens
cgccgccgccggcgcggaaggacgaggcgaggcgagaaacgagaaacgaaggaggcccaaccacaaaaggagccgacggaacccagacg

SEQ ID NO: 256814 - RNA, 50 nt, Homo sapiens
aaaggacgcgaggcgaagacgaagaacggaagcgccccagaggagagggc

SEQ ID NO: 256815 - RNA, 71 nt, Homo sapiens
ggagcaggagccggcaggcggggaggagccaggaaaggggaggaaggaagggggagcaacagacaagcccg

SEQ ID NO: 256816 - RNA, 76 nt, Homo sapiens
cgccgagggcggccagcaaaacaccaaccccccagggcggcagaacaggaacaagacaacacacacgcaccagggc

SEQ ID NO: 256817 - RNA, 73 nt, Homo sapiens
cccggggacccccgacgccaggcagcgcccccaaacgcaagaaagacgacacagcagccacaaaaccaagcga

SEQ ID NO: 256818 - RNA, 70 nt, Homo sapiens
agcaacagacgcgacaccagaaaagccgagagaaccccacagcaacacaaccgaggaaagcgaccaagcc

SEQ ID NO: 256819 - RNA, 60 nt, Homo sapiens
ccgcaacccgggcccgcgcacaagaacgagcagcagccgcccaaaacacaaaccaaagaa

SEQ ID NO: 256820 - RNA, 87 nt, Homo sapiens
cggccagcacgcggacgcgagacggcccggcgcagcgagcgcggacggagaggaaagcgccgagaaacgcggaaaagaagaggcaga

SEQ ID NO: 256821 - RNA, 74 nt, Homo sapiens
gccgcaggccgcgagcagcggacgccggccgccgcaggagggaggccaagaggccagggagagccgagacgcag

SEQ ID NO: 256822 - RNA, 79 nt, Homo sapiens
cccacacccaccaacaacaccacaaaaccacagccaagcaacaggcgcacccacagggccaggagggcaacagcaagcg

SEQ ID NO: 256823 - RNA, 79 nt, Homo sapiens
agccagccggcccgaggacaccgacaccagcaggaccgaaaagacgcggccccaaaggaaacacccgaagaacacagcg

SEQ ID NO: 256824 - RNA, 77 nt, Homo sapiens
gacccgccgaaaaagcgagacaggaccaagacccacggcgaagaccaacgaaagacccaaccgacaaaacaaccaaa

SEQ ID NO: 256825 - RNA, 72 nt, Homo sapiens
acaccagcggacagccccccaccacaacacgaagagaggccgcacgcccaaagcggaaacgcggaagagacc

SEQ ID NO: 256826 - RNA, 69 nt, Homo sapiens
gggaaaggaacaacgggcaagaaagaaaggaagcacgcgcgcggacaagaccagaaagaaaagaaccaa

SEQ ID NO: 256827 - RNA, 74 nt, Homo sapiens
gaagacgaacaaacagcaagaaagaccacaagaccaaccagaaggaaaacacaccaggcacagaaaggcccccc

SEQ ID NO: 256828 - RNA, 72 nt, Homo sapiens
agagggagagaacaaccagcggaaggaaggagaacccacccgccccagcagcccccagccaggaaagaacag

SEQ ID NO: 256829 - RNA, 78 nt, Homo sapiens
acaaggagaagcacggaccaaagcagcgcaacccagccacagggaacggccagcaccaagggcaccaggagaaagggg

SEQ ID NO: 256830 - RNA, 77 nt, Homo sapiens
gccccgcaccaggaggaggacgacagcacggacccaaagacaggaccacgcaccagcagagaaggaaagcaaaccga

SEQ ID NO: 256831 - RNA, 71 nt, Homo sapiens
cagggccccacgacacaagaaggaggcagcggccacaaaagccacagcggaaccggaaagaagcacaccac

SEQ ID NO: 256832 - RNA, 74 nt, Homo sapiens
ccgggcagcgagcccacacaggcacgggaggggagagagaaccggcacaccggagcaacccagaacacagcgga

SEQ ID NO: 256833 - RNA, 77 nt, Homo sapiens
cgggccaccagcggggcagcaaccaggacacccgggaagcgccggaggaagagcggaaaaggcggagacgaaaaccg

SEQ ID NO: 256834 - RNA, 78 nt, Homo sapiens
ggggaggcgcggagcgcgcggggccgcgccgcgaccccacggccgggcaccgaaagacaagagacaaggcacaaagcg

SEQ ID NO: 256835 - RNA, 81 nt, Homo sapiens
gcggcaggagggagcaggagcggaccggcccggaaggaagcaccagagcccagagcccacggaggagcgcaggcggagacc

SEQ ID NO: 256836 - RNA, 42 nt, Homo sapiens
cgccaggcggacaaaagccaaagaaggagaggacagaaagag

SEQ ID NO: 256837 - RNA, 90 nt, Homo sapiens
cggcgaggaaagcaggaggaggggcggcggcgggaagaaagacgaccccgacgcaggccaggagccgcggacagaagccgagcacggccg

SEQ ID NO: 256838 - RNA, 81 nt, Homo sapiens
cccgcgccgacccgacaaccgacgccggggccgaggagcagggaccggcggccgcggggagcaacgggcccagaaaacccc

SEQ ID NO: 256839 - RNA, 76 nt, Homo sapiens
gggaccgacgccggcagaacacgcgcgggaccccgggcacggcgcgcgggagggccgagaggaggggaaagcagag

SEQ ID NO: 256840 - RNA, 60 nt, Homo sapiens
agccaccgcgcccagccccccacaaggcaggcccacacaccagccagaggaaaaacagaa

SEQ ID NO: 256841 - RNA, 79 nt, Homo sapiens
cccgcgcgacccggagccccgcaggaggcagcgagaggaagaaaggacacaaagcagaagaaaagccacaaacagaagc

SEQ ID NO: 256842 - RNA, 71 nt, Homo sapiens
caccccgcccgccaaggcggcgcgggggccgaccgcgcgaaacgcccagaaaccaagaagcagcacgccgg

SEQ ID NO: 256843 - RNA, 68 nt, Homo sapiens
gccaggcggaagcagaggagcaggacaagccccagagagagcccgggagcacgggagagaagcaggca

SEQ ID NO: 256844 - RNA, 35 nt, Homo sapiens
gaacagcccaaaaaagggccccaagaaaagcggaa

SEQ ID NO: 256845 - RNA, 41 nt, Homo sapiens
cgcaaggccagcgcccagccagcagccaggggaagggaggg

SEQ ID NO: 256846 - RNA, 77 nt, Homo sapiens
caaggaggacccacgagacagggacaggcggccaaaagaaaaaggcacaaacccagcacagagaagacggcgacaag

SEQ ID NO: 256847 - RNA, 73 nt, Homo sapiens
gaaggaacaacagaacgcacgaagcaagcgccagcagcgcaggccgaggaggaggaacaccaaaaacaagcag

SEQ ID NO: 256848 - RNA, 73 nt, Homo sapiens
cgagaggaggcggagaccacccaaaccccccaagaagggcgcccacccaagcagaggcagggccgaagcacac

SEQ ID NO: 256849 - RNA, 67 nt, Homo sapiens
gaagcacggagcccaagcgcagagaagggaggcgccggcagaaaaccagggaacacgaagaaaagac

SEQ ID NO: 256850 - RNA, 65 nt, Homo sapiens
gcaagcacacaacaaacagaacgcaaagggcaccgagggcggccgagcccggaccacgggcagcc

SEQ ID NO: 256851 - RNA, 66 nt, Homo sapiens
gccaagcgaaggaaaagggaacggagggaaagcgacaaacaaccaacccacagagacccagagacc

SEQ ID NO: 256852 - RNA, 80 nt, Homo sapiens
ccacggagaagaggaggagcaacagaaacagaaagaccccaggagaagacaggggaaggaagcacagacgaccaaggccc

SEQ ID NO: 256853 - RNA, 59 nt, Homo sapiens
ggccagaacggcaagggcccaaggccaggggcaaggaggagccccggaggaggaggaag

SEQ ID NO: 256854 - RNA, 74 nt, Homo sapiens
aaaagccgcacaggaaaggagacacgggaagccgaggagaaaagaaaaggacaaggggaaagcgggaaagaagc

SEQ ID NO: 256855 - RNA, 60 nt, Homo sapiens
gcacaagaggagaagaggaacaggccgagagcagccagaagacaaagaggggaagacaca

SEQ ID NO: 256856 - RNA, 74 nt, Homo sapiens
cagacacccaccggaacacaaccacgcccggcgagcccgggaagcaggcgcaaaaacaggaaaacgacacgacg

SEQ ID NO: 256857 - RNA, 72 nt, Homo sapiens
gcggaaacaacgccgcaagcaaagcggaagaggccccaacggcaacagaaccagaacccacaagaaacaacg

SEQ ID NO: 256858 - RNA, 59 nt, Homo sapiens
agcagggacaccgaaacaccacggaagccaagaagccagcgagaagaccgagaggccgc

SEQ ID NO: 256859 - RNA, 59 nt, Homo sapiens
ggcagcggcgcgccccggcggcgcgcagagccagcaagccgcccaccgaagggaccagg

SEQ ID NO: 256860 - RNA, 83 nt, Homo sapiens
cgacagccaggcccggaagcgagggcggccgcgccggcccaggccagagcacggccggccccacacaccgacaccgggaggga

SEQ ID NO: 256861 - RNA, 75 nt, Homo sapiens
cccggggaggcggaggcaacacaaccagcccgagccccaccaacccgagaaggcgacagggacagaccgggcaaa

SEQ ID NO: 256862 - RNA, 74 nt, Homo sapiens
cggcaaaccgaagagcaacgaggcacgaggcgccgcgacccaaccgaggaagcaccagcagaagagggggcaag

SEQ ID NO: 256863 - RNA, 55 nt, Homo sapiens
ccaggggagaggaagagaagaggagaggagcgccaaaagcaggggaagccggaag

SEQ ID NO: 256864 - RNA, 56 nt, Homo sapiens
cccgcgcggcgcggggaccgcggcccggacaggcgaagaaacagagaccacagagc

SEQ ID NO: 256865 - RNA, 51 nt, Homo sapiens
gagaacaagcaacggcgggacccagaagaaccacgcgcaggccagagcagc

SEQ ID NO: 256866 - RNA, 77 nt, Homo sapiens
gaaaggcgggccagaaaccggaggagcagacaaaggagcgcaggcccaaaaaaacagaccaccagccgcgaggacag

SEQ ID NO: 256867 - RNA, 69 nt, Homo sapiens
ggcgagaagggaagggaaagcagaggaaggcagaagaaaaaggagaagcagagaaccccagacacagag

SEQ ID NO: 256868 - RNA, 80 nt, Homo sapiens
gcccccccggggcaacccagacggcaacaaaggcgaggagacgcagagccccagcggggaggcgcaacacgaggcgccgc

SEQ ID NO: 256869 - RNA, 79 nt, Homo sapiens
gggagccaccagcagcggggggcgacccccagaagcgccaaaaggcagcaaaggcgagcaaaacaagagaacacacgga

SEQ ID NO: 256870 - RNA, 66 nt, Homo sapiens
caccgaggagcggcaacgacggagaacaaagaacaaaggggccaaaccaagcccacgcaggaaggg

SEQ ID NO: 256871 - RNA, 83 nt, Homo sapiens
agaaaaagcggcagcgagaccgcaggggaaaggacaggcgaccccaggaccacgcccccggcccagggccaaggagccacaca

SEQ ID NO: 256872 - RNA, 80 nt, Homo sapiens
cccccagagacacaccggagagcaaaaagcggaaccacaagaagaaagcaacgacaagaacccacacgcgccgagcccgg

SEQ ID NO: 256873 - RNA, 77 nt, Homo sapiens
acacaccgcaccggcccggcaagccgcggagaaccgaaccaacagccagccaaagccaggcagcacagcacaggaaa

SEQ ID NO: 256874 - RNA, 53 nt, Homo sapiens
ggccacggagaccaccgagcccaagggcccccaagccggcaggggaacgagga

SEQ ID NO: 256875 - RNA, 72 nt, Homo sapiens
gagaagcaccgcacccagagaaagcgcggacaacaccaggaaaagacagagggccagacagccaccgaaggg

SEQ ID NO: 256876 - RNA, 39 nt, Homo sapiens
gggaccgggagccgcaccaacgacaagggaggcgaggac

SEQ ID NO: 256877 - RNA, 75 nt, Homo sapiens
cagacgccaccacgggcacccgcgccgggcaccgaggaccagccaagacagaagccgggcggaagcccacgcaca

SEQ ID NO: 256878 - RNA, 78 nt, Homo sapiens
gaaaggaagggcgggaccaacagggagccagcccagacggccgagaccaccaggcaaggggaaggggcgccgcccagc

SEQ ID NO: 256879 - RNA, 74 nt, Homo sapiens
aggacgaggcgaggcgagaaacgagagagaacacaagaagaaagacagcacgggccgagccgcgcaacgccccg

SEQ ID NO: 256880 - RNA, 68 nt, Homo sapiens
gacggaggaggagcccagcgaccccaaacgcagaggaagcgaggcagcccagaggaagaaacaaagca

SEQ ID NO: 256881 - RNA, 81 nt, Homo sapiens
ggcaccgggacggaccgagaccggaccgagagcggaccgagagcgcgaaacgcacgagaagaagagagaagaagcaaaccg

SEQ ID NO: 256882 - RNA, 76 nt, Homo sapiens
gaaagaggcggcccaggagcggcggcgaagaaggaggcaggcacgggagccgaagcaacaccaacgcacccagccc

SEQ ID NO: 256883 - RNA, 64 nt, Homo sapiens
cgagggcgagggacagccaggcggggacaccagaacgcaaagcgcagagacaaggaagggaagc

SEQ ID NO: 256884 - RNA, 75 nt, Homo sapiens
aaggaccaagaaccaggcagaagaaaaaccagcacgcaggaacaacagacaagcggaacaccgaagagaagaggg

SEQ ID NO: 256885 - RNA, 77 nt, Homo sapiens
aaccgcggcgcagacagccaaggagacgcgcgccgcccacccccgccggcgccccccggccccacaggccccccccc

SEQ ID NO: 256886 - RNA, 79 nt, Homo sapiens
gacagaagggccaagcccacgcagagcaaagcagacaagacaacagccaggaagcaggaaaagcgaagaacggaaaaaa

SEQ ID NO: 256887 - RNA, 77 nt, Homo sapiens
gccgaccggagccggacgagggccgcggaaggaggggcccggggggaggaaaacagggcgaggacgggagaacaggg

SEQ ID NO: 256888 - RNA, 71 nt, Homo sapiens
aggagggagagaggaccccgggacacgaaagccaggaaagacaacggcaagcggagaagagcaaggccgaa

SEQ ID NO: 256889 - RNA, 82 nt, Homo sapiens
gggacgcgagcggcgagccggagcgcggagcccggccccgcaccaggaggaggacgacagcacggcggggccggggagcccg

SEQ ID NO: 256890 - RNA, 80 nt, Homo sapiens
cagcagcgcgaagcggcggccagagaagagcaagggcacgagcacggagccccaccaccaagagagagacgcgggcgaca

SEQ ID NO: 256891 - RNA, 51 nt, Homo sapiens
gcaccgggagcggcgaagaggcaccggaggaggccaccgcgcggcgccacc

SEQ ID NO: 256892 - RNA, 83 nt, Homo sapiens
cggaacgaacacccgggcagggggcaggaggaggacggcagcaaccgcagcagcagcccaggcccgccagccaccgcagaggc

SEQ ID NO: 256893 - RNA, 57 nt, Homo sapiens
ccaccggcgccgccgggcagggaggggagccgggccaggagacacagcaggggccag

SEQ ID NO: 256894 - RNA, 74 nt, Homo sapiens
cccgcccgcgcccggggcgcgcccaccgcgccgcaccagcgagcgcagaaccgcagcggagaggaaccaggccg

SEQ ID NO: 256895 - RNA, 75 nt, Homo sapiens
ccaacaagagagggaggccccaaaacaggggcacagacgacagaagccaagagggcgcaaagaggaaaagaagag

SEQ ID NO: 256896 - RNA, 82 nt, Homo sapiens
gcgggggagcgcgaggaggcgcaggagacgaccgcaacggcagggagaagacagaggagccagaccaagagacagcacaggc

SEQ ID NO: 256897 - RNA, 78 nt, Homo sapiens
cacaaaaagacaccccgaagaggaccgagaccaaagccacagcaaggcgccaggggcgcagcagcagcccaggaagac

SEQ ID NO: 256898 - RNA, 71 nt, Homo sapiens
aaggcagggcaaaccagaaagacgacagccagcaggggcagaagcagcagacggaacgagggcaaagaagg

SEQ ID NO: 256899 - RNA, 68 nt, Homo sapiens
cggacggacacagacaccaagggaggccacagagacaagagagaggcaacgcggaaaaaagccggggg

SEQ ID NO: 256900 - RNA, 79 nt, Homo sapiens
gccgcgggggcaacggagaaaacccggaaccgcgacggcggcaggaaaaaccagaagagaaaaaacaaaggggagaggc

SEQ ID NO: 256901 - RNA, 81 nt, Homo sapiens
gaggccaacggcagaagccaccacaaaagcgaaagggcacaccacagaagaggcaaagaagagaagacacacaagcaggca

SEQ ID NO: 256902 - RNA, 72 nt, Homo sapiens
ggaacagagaaaagaaagaggagccccaggcgggaagcaagggcgaccgaccacgcaaccacccccgggcga

SEQ ID NO: 256903 - RNA, 73 nt, Homo sapiens
ggcagaccagagcccggacgaagccaagcccaccgaagggagcgagcacaaacgacacacgcaaaccacaaag

SEQ ID NO: 256904 - RNA, 73 nt, Homo sapiens
agggccaaagaagggagagagagcaaggccgggccgcagggaagcccggaagcagaagccccgacagccagcc

SEQ ID NO: 256905 - RNA, 77 nt, Homo sapiens
agcagcgggcaggaggggaaaccggcgaagcacaggagcacagcaagcgggagcaggcagaccaaaggaacagaagc

SEQ ID NO: 256906 - RNA, 64 nt, Homo sapiens
cggaccgaggccgcgaaaggcagccaaccgcaagcgagcggaacccagaagaacgaacaaggcc

SEQ ID NO: 256907 - RNA, 83 nt, Homo sapiens
ccccgccgcgccccccccaccccggccgcgcccaagcgcaggggccccgggccagggggggacccgaagcccgcgagaaggag

SEQ ID NO: 256908 - RNA, 70 nt, Homo sapiens
acagacaagaaaagcacgaaggacaggaaaaggcccaaaaaggaagcaaacagggcccacccacacaaga

SEQ ID NO: 256909 - RNA, 72 nt, Homo sapiens
ccagcccgaccaccaccgacaccccggcagagaagaaaggagaaagaagcggagagacgaggacgcgcacag

SEQ ID NO: 256910 - RNA, 67 nt, Homo sapiens
acccaggagacaggacagcacaccccaaagcccacaaacagccacacagaaaagaaagaagacaggc

SEQ ID NO: 256911 - RNA, 53 nt, Homo sapiens
ggaaagaagagacagcgaggagacaacccccaggggcagcacagccaagagcc

SEQ ID NO: 256912 - RNA, 89 nt, Homo sapiens
agcacgaacaggaaacaggaagccgggagagaaacacagagccagggagacaaccagggcgagggcgaaccaccaggccaagaaacccg

SEQ ID NO: 256913 - RNA, 84 nt, Homo sapiens
aaagaaagaggaggagagggcaacgggagcaaagcacagccgggccaaaggcacaggccacccaccagcccagaaaccccacca

SEQ ID NO: 256914 - RNA, 67 nt, Homo sapiens
gaggcgcccgcagccacgcggaggcggcggggagccgcgcgcggcagcaagcagcaagcggaaaacc

SEQ ID NO: 256915 - RNA, 74 nt, Homo sapiens
gacagcgcaaggagacgaaggcagggaaaaaccaggacaaaaagcaaaggacggcgcaaggaggccagacggcc

SEQ ID NO: 256916 - RNA, 79 nt, Homo sapiens
cccgccccggcggcggccggcgggaccaaagggcaaccaaaaaccccccccaaaaacaaaagaggcggcaaggcagccc

SEQ ID NO: 256917 - RNA, 101 nt, Homo sapiens
cggcgacccaggcacggggagccacagaagcgaccccaaaccccaacgggcggccaccacaacgccaacggcaggggcccagcgccggccagggacgccgc

SEQ ID NO: 256918 - RNA, 74 nt, Homo sapiens
cgagcgcagcgcccgggcgacggcggggccgcgcggccaggccggggcagcagaagaggacaagcagacagcac

SEQ ID NO: 256919 - RNA, 72 nt, Homo sapiens
caaggcccccagcacacagcgcggccaaacagacgggcccgacaagagaggcggagccacccccacaacgga

SEQ ID NO: 256920 - RNA, 91 nt, Homo sapiens
cgacgagaaaaacaaggagcggacacgagccgagggaggggaaaggcgcaggaaccgggggcggcggcagacaagaggacagcgcccgccg

SEQ ID NO: 256921 - RNA, 75 nt, Homo sapiens
gcagggcaaccggaccccggccgagcacgaggccccgccgaacgccacggcgcccggccccccggccacccccgg

SEQ ID NO: 256922 - RNA, 54 nt, Homo sapiens
gggcgaggcggacgcgcggcgcgcagaaacagacgcacgccgaaaaaaaacgaa

SEQ ID NO: 256923 - RNA, 75 nt, Homo sapiens
agacggcgggggggacgcccgggccgggcgcgcccgccgcagggcgaagagagaacacgcacggaaggaaggaga

SEQ ID NO: 256924 - RNA, 77 nt, Homo sapiens
aaagagcaaagaagaggccgcaaagcgacaagagacagcaggccacgcgaaagagagcacccggaccacgagaaaca

SEQ ID NO: 256925 - RNA, 110 nt, Homo sapiens
aacaacgagcggaaagcaacccggagcggaggacaggagaccgaacaggcacacagggaccaagaagccccggggacacgcgagaaaagacgccgaagggaagaccagcg

SEQ ID NO: 256926 - RNA, 70 nt, Homo sapiens
caaagaaaaaaaccgagcagaaagaaagcccgaaaagccacccaacaggagagaccaggaagacagaaac

SEQ ID NO: 256927 - RNA, 89 nt, Homo sapiens
ccaggcgacagcacgcagacgccaacccgccgcgcaccgacccgacgcgccggcccacgcgcggccaagcgcccggcagcaacaagggc

SEQ ID NO: 256928 - RNA, 78 nt, Homo sapiens
cagaacaccgcgcggggaagaaggggccgacccacacccggagcaggcccaggagggcgcgcgcccagaagaggccag

SEQ ID NO: 256929 - RNA, 81 nt, Homo sapiens
gcgaagcccggcgccagacaggccgcaacacggcccagaacccgacccagcaaggagaagcccgcccagacagaagacgaa

SEQ ID NO: 256930 - RNA, 71 nt, Homo sapiens
agccgagacagacagagaagggcagaagcaccgaggaaacaagagccaccgagcgaagacccgagaacaag

SEQ ID NO: 256931 - RNA, 71 nt, Homo sapiens
agcgacgacgggacaagagaacagccgcgcggcgagcggcccgcacaaggccggcagagcaaccagacgac

SEQ ID NO: 256932 - RNA, 70 nt, Homo sapiens
ggcgaacaagaagaagaacccagaggcaagagggagaagacagcgaccagggaggcaacaacaaggagcg

SEQ ID NO: 256933 - RNA, 76 nt, Homo sapiens
gggaacccgccgcgcgccgcgaccccaagcagagccggaagaaaacagaagcggagaaagggagagcacagggggg

SEQ ID NO: 256934 - RNA, 65 nt, Homo sapiens
cccgagcgggaaacaccgggcaaccaaccggcaagaaacaagcaaggggaagaaaagcagcagca

SEQ ID NO: 256935 - RNA, 68 nt, Homo sapiens
cagcccaggaggcagcaccaaggaaacagaagacagccgaaccaagggcgacaaccagagacaagcag

SEQ ID NO: 256936 - RNA, 79 nt, Homo sapiens
gaaaaggagaaaagaagccaaagggacacggacgaacgcagacacccgagcgacacaggaagaacaagaaggagaacca

SEQ ID NO: 256937 - RNA, 77 nt, Homo sapiens
caagaaaaaacacgccgagcgacgaagaagaccggaagcccacaaagaccccaaaggagggaaaagcaggacaggag

SEQ ID NO: 256938 - RNA, 38 nt, Homo sapiens
gagagaggggggccaccagggcgcgcggcccggcacac

SEQ ID NO: 256939 - RNA, 79 nt, Homo sapiens
ggaggaaaggacgcgacgagcccggcaaggaggccggagcgcgaagacgcagggaaagcggcacacgaaaggggcacgg

SEQ ID NO: 256940 - RNA, 66 nt, Homo sapiens
caaagaccaggagagggcggccaagcccggaaagagcacaggccccggacgggcaggcagccaacc

SEQ ID NO: 256941 - RNA, 64 nt, Homo sapiens
agggcgaaaccccacaagggaaaggaaaggacccccccaggcggcaaggcgcacggaacggaac

SEQ ID NO: 256942 - RNA, 75 nt, Homo sapiens
cgagaggacgggaccaggcgaagcggccgagcaggcgagcgaacgacgggaggccaacagacccaacccagaagg

SEQ ID NO: 256943 - RNA, 69 nt, Homo sapiens
gagccagaaacgaaagccgaaaaccagccccgcccacacacaccaacagaacccgggggacccccagca

SEQ ID NO: 256944 - RNA, 66 nt, Homo sapiens
cgggccaggcaggcggaagggcacagaggacacaaaggggcagaccaacaccacccagcaaaaacc

SEQ ID NO: 256945 - RNA, 68 nt, Homo sapiens
acaagacgccaccgcagcacccagcgaagaagaaaccagcaaacgacaggacacccaggaggagggca

SEQ ID NO: 256946 - RNA, 77 nt, Homo sapiens
gccagggcagaggcgaagggcgggggcgagggcccgggacagcgcacccacacagagagcccacccagcacggaaca

SEQ ID NO: 256947 - RNA, 83 nt, Homo sapiens
cgcaggcgagcggggcgaggcagcgcagccgcgccgcaggggcgcgagccgaaccggggacaggagaaggcggggaaaaaacc

SEQ ID NO: 256948 - RNA, 92 nt, Homo sapiens
gcaccggcccgaccagaggacgcaagacccgcccccaagaaacggcgaggaaagagaggagccccggaaagaaaaggacagacccggccaga

SEQ ID NO: 256949 - RNA, 83 nt, Homo sapiens
ccaaccgcgacagaggcaacggaagaacaggaggacccccgcaggcagcggcaggaccgaaggacacagcgagaagcggggag

SEQ ID NO: 256950 - RNA, 53 nt, Homo sapiens
aagaaagaccacaagaccagaaaccaaacaaggacaagccagaacaaaaacca

SEQ ID NO: 256951 - RNA, 82 nt, Homo sapiens
cagaaccagagccacccgggagaggaagagcgaggaggaacgcgcaaggcaaagcaccgagccacacaggagaacagcggga

SEQ ID NO: 256952 - RNA, 102 nt, Homo sapiens
caaggaacaaaccgaagaacagcgggaaagaaggcaaaacacgggccgaaacacaagcaaggaacacaaagaagaaagaaaggaacggaaggaagaaaagga

SEQ ID NO: 256953 - RNA, 80 nt, Homo sapiens
ggagaggcgagccgcgagagggccggcaggcccgggaaggcaggcacgggcgcggaggggaaccggagcagggaaccccg

SEQ ID NO: 256954 - RNA, 37 nt, Homo sapiens
ggcaagagccgccgaaaggaacccaaggaccgcaaag

SEQ ID NO: 256955 - RNA, 72 nt, Homo sapiens
accagcacaccgcggaggcgcccagggagacccaaaggagaaaggagcaagaggacacggaacggcgacaag

SEQ ID NO: 256956 - RNA, 72 nt, Homo sapiens
caccaggagcacgcgacagcgaggaagcgcaccacagcacaaaaggagggaacaggcacgccccacccgcca

SEQ ID NO: 256957 - RNA, 81 nt, Homo sapiens
gaaaggcagaagggaaggagcagaacggaggggaacacaaaaagagaacacaaggaacgaaaggaagggaagaagcagaac

SEQ ID NO: 256958 - RNA, 82 nt, Homo sapiens
ccaggccccgccgcccgggggcgccgcccaccgcgcccgccgagaaggagggggcagagcacggcaggcagaaggggccaac

SEQ ID NO: 256959 - RNA, 64 nt, Homo sapiens
cccggcccacaggggggggcaaacccgagagaacgggcaaagggaaagacgagaccccccggaa

SEQ ID NO: 256960 - RNA, 62 nt, Homo sapiens
acgcagaagaggcgaaacagcaggggacccccaaggacacagcacgggaacccgaaacccga

SEQ ID NO: 256961 - RNA, 38 nt, Homo sapiens
gagccaccagggagcgaaaccaagggccgggagaggaa

SEQ ID NO: 256962 - RNA, 75 nt, Homo sapiens
caacccgagccaagcaggaaggcccagcaaagagaagaagacgaagcaagaagccaaaagagggcaggacgccag

SEQ ID NO: 256963 - RNA, 75 nt, Homo sapiens
ggagcggaggacacgggggccacaaagccccccggagacgcaaccaagagcccagcgagcaaaacggaaaaaaaa

SEQ ID NO: 256964 - RNA, 77 nt, Homo sapiens
gaggccaggcaaaggaaccacccaggaaacagcgcaagcccaaaggggcacaaaacgccccgggagagaagaggagg

SEQ ID NO: 256965 - RNA, 76 nt, Homo sapiens
ggccagccgggcaggggccagccccccacaacccagccagccaccacagcaggacacacagacagagccgccggcc

SEQ ID NO: 256966 - RNA, 91 nt, Homo sapiens
cgcgagcggcgcgagccgggggccgcccgccccgcgcgcggccggcggcccaggcgcacaccgcgacaggaagggaaggggcggagacggg

SEQ ID NO: 256967 - RNA, 74 nt, Homo sapiens
caagggcagacagcggcaacagaagccagaccggcgcgagaacaacggggaaaaggaaacagaaaagagaaagg

SEQ ID NO: 256968 - RNA, 80 nt, Homo sapiens
agggccagagccggaaaacagcaagacaagggaggcgaggacggacaaaaggaaacggacgggaggccagccagcagaag

SEQ ID NO: 256969 - RNA, 64 nt, Homo sapiens
ccgaaaaagcaaggaacagaagccaccgcaaaaaggagaagacacacggggcagcaaaggcagc

SEQ ID NO: 256970 - RNA, 77 nt, Homo sapiens
caaaaagagagagaagggaaaaacccagaaaggggcccaaaacacaccaggacaaaacaggccacaccagcgccacg

SEQ ID NO: 256971 - RNA, 64 nt, Homo sapiens
cacacaggcaagcaggagggcaccccaaaagaaagagggggcccggaggggcgcccaggccgag

SEQ ID NO: 256972 - RNA, 75 nt, Homo sapiens
cccgcgcccccgccgcgcccgggagacgccccgccgcccacccaggcgcgggccccggggccgcggcgaaaggac

SEQ ID NO: 256973 - RNA, 75 nt, Homo sapiens
cgaaggacccagcagggcaccagacaacaggcacaaagagagaaggaacacccacagggcagacagagaaagaac

SEQ ID NO: 256974 - RNA, 74 nt, Homo sapiens
gacggcgcgcgcccgaggcgaggaggagcgcggcggagcagcaccaacacacagcgagacggcagggagaccaa

SEQ ID NO: 256975 - RNA, 81 nt, Homo sapiens
ggcccagccggcccgcgggggagccccgggagccgcacgagggacaagaacacgaaaagcaccaacaaagaaaccaaaaca

SEQ ID NO: 256976 - RNA, 81 nt, Homo sapiens
acgcgggcagcgaacaagcgggagcaaggagggcgaagagcgaggagacacacggcagggaaccccaccccggaaggcggg

SEQ ID NO: 256977 - RNA, 79 nt, Homo sapiens
aaaaaggaagagggcgaaagacgcaccggcacccaaccaggagggacgaaagacgccaggaagaacaggaaaaggcgaa

SEQ ID NO: 256978 - RNA, 56 nt, Homo sapiens
cgccaggacacccacacgaacagaagaagggacagaaaaaggaccacggaaaagaa

SEQ ID NO: 256979 - RNA, 46 nt, Homo sapiens
acaacgcagaaagcccacaaaaacccggggaagccaaccaaggaac

SEQ ID NO: 256980 - RNA, 87 nt, Homo sapiens
cccgaaggaacagaccagaaagacgcagccaaagaagagacccagacgaagagcgcacagaaagagggaaaacaaagaaccaaaaca

SEQ ID NO: 256981 - RNA, 76 nt, Homo sapiens
ccgcgaggaccggcgggagagagagcgcccagaaagccagcaaacggggacagcgccgaccggaacagggaccacg

SEQ ID NO: 256982 - RNA, 32 nt, Homo sapiens
ggagagcacccaacaaagacagggagagagcc

SEQ ID NO: 256983 - RNA, 80 nt, Homo sapiens
caccggcgggaggaacaaaaggaaacccagcggcggcagaaccagccggcacaaagccgaaccagagagagcaacgcccg

SEQ ID NO: 256984 - RNA, 72 nt, Homo sapiens
agaaagagaggaaagaagaaaaccaagaaagccccacgaaacgagacccagggagagggagcgaaccaacac

SEQ ID NO: 256985 - RNA, 79 nt, Homo sapiens
ggcggcacgagggccccgacccagacccgggggaagaacaagagagagaaccggcgccgagagggcagaccagcacagc

SEQ ID NO: 256986 - RNA, 75 nt, Homo sapiens
aaaaaaggggcaggagaaagagagaacaaaaggcacacacacccgcaggagagcgccggagaaaggaagaaccca

SEQ ID NO: 256987 - RNA, 70 nt, Homo sapiens
cggcgcagaaagaggagcgagggccagcagcagaaagcaccccagcgaggcccagcaaaaggaaagcaaa

SEQ ID NO: 256988 - RNA, 87 nt, Homo sapiens
gccaagccgccaggccaccacagcccggggagcccacagcgccacgccggaacaaggaccgcacccacacgcaaaggcagcagaggc

SEQ ID NO: 256989 - RNA, 60 nt, Homo sapiens
cccgaagcgaggcaaaaaccggaagaggagaaccggaaccgggagcacaggaggcgcgag

SEQ ID NO: 256990 - RNA, 86 nt, Homo sapiens
ggcggcacggggccggcggccacggccggaaggcagcaagccaggggccaccgagacaaacacgggaaaaaagaaaaacaaagaaa

SEQ ID NO: 256991 - RNA, 38 nt, Homo sapiens
gcagacaccagccgcgccaggaagcccggggcggcgac

SEQ ID NO: 256992 - RNA, 58 nt, Homo sapiens
gcgccacgaaggccaggccagggagggcagaggacaacagcaaccaagaagacgagca

SEQ ID NO: 256993 - RNA, 74 nt, Homo sapiens
agaggagcggacccccgcggcgcgcagcccagcagaaaaaggcgcgcagagagaaaaaggcaacaaagaaaggc

SEQ ID NO: 256994 - RNA, 74 nt, Homo sapiens
cggccccggggcgcgggcagccacgcccggaagccgagcagaagcaggaaaacagagacaaccacgcagagacg

SEQ ID NO: 256995 - RNA, 60 nt, Homo sapiens
ccagggaacccggcaccgccccagcgagcgacgcgcccacggaggaggcgggggccccac

SEQ ID NO: 256996 - RNA, 79 nt, Homo sapiens
cccccccgcggcagcagggagccaccagcagcggggggcgacccccagaagcgggaagccccgcccacggcccccacca

SEQ ID NO: 256997 - RNA, 81 nt, Homo sapiens
aacaacacacagcagcacaagcagacagagagaggaccagaaccagaccggaaagcaccaggcaaagaaaaaaacaggagc

SEQ ID NO: 256998 - RNA, 40 nt, Homo sapiens
caggaagagcacggacggagcagcccggccgacaaccaag

SEQ ID NO: 256999 - RNA, 79 nt, Homo sapiens
gaagcgacgccccggggcgggggcgaggcggcggcggcggccggagccccagccgggagaaagaagagagaccagaaac

SEQ ID NO: 257000 - RNA, 84 nt, Homo sapiens
ccgccggcaaccccgggcggccgcaccgccaggccagggagaccagggggcaggggaggagcgcccaggcgaccggcgaacagg

SEQ ID NO: 257001 - RNA, 61 nt, Homo sapiens
cgcgagccaagcgcgcgccggcaaccgccgcgggccgagcccgcccgccaggaccaggaca

SEQ ID NO: 257002 - RNA, 76 nt, Homo sapiens
ggaggaacaaaagcgcaaaccggagccagaaacaaccgcaaccacccaacaagccaaacggaacaaaaccgaacca

SEQ ID NO: 257003 - RNA, 77 nt, Homo sapiens
ggccgccggccaccgcgcacccacgaacgcccaccccccgaacccagccgcaccgacgagagagccaggccagaagg

SEQ ID NO: 257004 - RNA, 68 nt, Homo sapiens
gaaggcaagaaaccagaaagagaacgggacaacaaaagagccacccaaggaagaaccaaaacaaaagc

SEQ ID NO: 257005 - RNA, 31 nt, Homo sapiens
gagggacgaaagagaaagaggaagaagacac

SEQ ID NO: 257006 - RNA, 74 nt, Homo sapiens
gagaaggaccaagaaccaggcgaggaaaaccaccacacaggggaaacacccagacaacacacacaacaggaaag

SEQ ID NO: 257007 - RNA, 74 nt, Homo sapiens
ggccccgcagcgggcggcccccgcagccccgcccaggcccggcagggaaaaaccaggacaaaaagcaaaggacg

SEQ ID NO: 257008 - RNA, 91 nt, Homo sapiens
gcggacgcgcgcagcccgcccgcccggcgaccagcaaggaaccagaagaagcgacgcccgcggagaaacaaaggagaggcaagagacaaca

SEQ ID NO: 257009 - RNA, 80 nt, Homo sapiens
acagagaaacggccagcccgggcgaagccgcagaaagcaacaaagcgagagcacaagaaaacagccccgagcaccagacc

SEQ ID NO: 257010 - RNA, 82 nt, Homo sapiens
ccaagagacaccacggcagaggccagaccgacagcaccgggaccccgacaaccagccaggagcaggaacaagaccacacagc

SEQ ID NO: 257011 - RNA, 44 nt, Homo sapiens
ccacgggaagccacacgcccaagacccaacagaggaagccgcaa

SEQ ID NO: 257012 - RNA, 76 nt, Homo sapiens
ccgagcgaacgcgcaacagggccgcacgcaaggcgaacccaggcacccagagacggagcggaaaccaaggaagaaa

SEQ ID NO: 257013 - RNA, 87 nt, Homo sapiens
ccggccccgccagcagcacgggaggccgcccgggacccagacaggagcgcgggaagaagccggcccggggccgcggacgaggaccag

SEQ ID NO: 257014 - RNA, 68 nt, Homo sapiens
aaacggcaagcaacaacgaacacaggcacgggaaagaaacaaccccgagaaaggaggagaaacaagca

SEQ ID NO: 257015 - RNA, 75 nt, Homo sapiens
aagccagagcgaggacgccggcaggacaccagcagcgcaaaacaccaggagcgccaaccggaacgaaagacaagg

SEQ ID NO: 257016 - RNA, 73 nt, Homo sapiens
cccggagggggccccaccgggcccgaaggcgcggaagaacacagacaagaagagaaaccgcaaaaagaaagac

SEQ ID NO: 257017 - RNA, 78 nt, Homo sapiens
gcgggaccacccgggcacagcaggcacggagaccacacgaaggggcagaagagcacaagacggaagagaggagcgacc

SEQ ID NO: 257018 - RNA, 82 nt, Homo sapiens
agagcagccggaacggcggaccgggacgcacgccagcgaggaggacccccaaaggaccggagcccaccaccagcgaaggaca

SEQ ID NO: 257019 - RNA, 75 nt, Homo sapiens
gggcgcgcgccgcgaccgagaagaaccaggcaccggacaccaaacaaggacaccaaggacccaagccgacaccac

SEQ ID NO: 257020 - RNA, 72 nt, Homo sapiens
cgaaaagcaacggggaaggcaaacgagaagcgggccaccggacccagggcacagaagggcaaaggagggaga

SEQ ID NO: 257021 - RNA, 68 nt, Homo sapiens
ggcccgcgcagaagaccaaaacagggacagggcgaagcacagaaccagcacgagagacggggcaccgg

SEQ ID NO: 257022 - RNA, 81 nt, Homo sapiens
agcaagaccgaggcaccgcgaggcaacccgggccaccgacggcagccggcccgggcgcccccagacacggaccgcgccgag

SEQ ID NO: 257023 - RNA, 76 nt, Homo sapiens
cggggggaaacaggcgaggcggcggcgcccggagggcagcgagaggggaaagaaaaagagcccaccaaaaggaaca

SEQ ID NO: 257024 - RNA, 73 nt, Homo sapiens
cgcaccagcacgcccacccagagaaggcaggcccacgggagccgagacccccgaggggaccagacgaagcgcg

SEQ ID NO: 257025 - RNA, 80 nt, Homo sapiens
ggagcggccggggccggggcgccgccgggcggccgggcgcggcgagcccagggcccgggacgagcggcccagcgacgagc

SEQ ID NO: 257026 - RNA, 74 nt, Homo sapiens
ccgccgggagcagaaccaagggccccggggccggcgaagaaagacacgacaccgacacgcgaggcagaggaccc

SEQ ID NO: 257027 - RNA, 53 nt, Homo sapiens
cacaccacccaggcaaacgaccaaagacaagaagcggaacgggcacaaagaag

SEQ ID NO: 257028 - RNA, 82 nt, Homo sapiens
ggcgcgacggacgggggcgccgcccgcgcccgggaccgacccccgccgcggccgcgccgagggggccccaggacccggacag

SEQ ID NO: 257029 - RNA, 65 nt, Homo sapiens
cgaggagagcccgcggcgcagcccccggacggagagagcagcgcgcgccccaccaccgccaggcc

SEQ ID NO: 257030 - RNA, 69 nt, Homo sapiens
gaggaacggggagagccgcaggcgcccaagcaacagagacggggcccggagagcagccccggggacaga

SEQ ID NO: 257031 - RNA, 74 nt, Homo sapiens
caagcgcacgaaacacgaaaggcaggacagaaaagacccacggaaaagaaacagaaagccacccccggagcaag

SEQ ID NO: 257032 - RNA, 87 nt, Homo sapiens
ccgggaccaggcccgggggcggcggccacgccaaggacggcccacgaccccccagggcaccacaacagaaccaggcacagaggggga

SEQ ID NO: 257033 - RNA, 68 nt, Homo sapiens
cacaggacagaccccccgggccggcacaaccccacagggaaacacaaagaagacaccagaagggccag

SEQ ID NO: 257034 - RNA, 90 nt, Homo sapiens
acaccccggaagcgggaaagagagcagcaccagcagaagagggcccgaccacggcaacccagaggcgaagcaggacacccgcaaagaaag

SEQ ID NO: 257035 - RNA, 57 nt, Homo sapiens
agagccgcagccgccagggacgggggccaccggacagaccagggaagggacgagaca

SEQ ID NO: 257036 - RNA, 72 nt, Homo sapiens
gagaggccaacagaaaaagacacgcgcaacaaagcaggaggcagcacggcaggagacgaggagaggacagca

SEQ ID NO: 257037 - RNA, 54 nt, Homo sapiens
cgggacaaaccagcaccagcgcaaacaacaccaaggcaaaaggccaaaacggaa

SEQ ID NO: 257038 - RNA, 76 nt, Homo sapiens
cccaagccagaagccgccgggaagcgccgcaaagcggagagcgcgaagcccaccgaaaggaaagccagacaggaag

SEQ ID NO: 257039 - RNA, 74 nt, Homo sapiens
aggaggagcaaggaagaccaaacaacaggcagaacgaaagcaggccgagccaggaccccaccaccacgggccgc

SEQ ID NO: 257040 - RNA, 78 nt, Homo sapiens
ccccccgccaggcgccgaccaccccagcaccagcccagagggaaagcacaccaccccagccagagagcagggagggcg

SEQ ID NO: 257041 - RNA, 78 nt, Homo sapiens
agccgacgcgccggcgcaaagaagcccaagccaggacggaccccaagcaagccggcaagaacgcgcaacacagcgacc

SEQ ID NO: 257042 - RNA, 74 nt, Homo sapiens
ggcaccaccaacaacgggagacaaggcccggaggccgacaacgccacaacggcaaccgccagaccagcaaaagc

SEQ ID NO: 257043 - RNA, 77 nt, Homo sapiens
ccaaggagacggagacaaggcgcaaaggcgaaggagaacagagacacccgggccacgagggcagcccgggacgacag

SEQ ID NO: 257044 - RNA, 75 nt, Homo sapiens
caccaggggcagacccagccggcagcagccaggcggagaacaacaaacagagcgcccccccccaaaggaagcagc

SEQ ID NO: 257045 - RNA, 79 nt, Homo sapiens
cccggaggcgccggcggggcgccgcggaccaacagcccaggaggccgagcgcgggaaagcagcggaaaaccccacgcgc

SEQ ID NO: 257046 - RNA, 68 nt, Homo sapiens
aaccaaacgacccgggggccaggcgaagaggagaggaaggcaccaaagacagaacaaagaagagaacc

SEQ ID NO: 257047 - RNA, 40 nt, Homo sapiens
gaaagcacgagaggaacagaaagccccggaccagacgccc

SEQ ID NO: 257048 - RNA, 75 nt, Homo sapiens
ggaggcgagacgagacacggcagcaggcgcgcgccccccgagcaggagggaaggggaagccggcacaggacgggg

SEQ ID NO: 257049 - RNA, 76 nt, Homo sapiens
acccagaggacgggagggggaaggggccggagggcagggggcagggcggcagagggagagagcccaccaaggaacc

SEQ ID NO: 257050 - RNA, 37 nt, Homo sapiens
agcaaaagcccagaaacacgggaagcaggacaccaac

SEQ ID NO: 257051 - RNA, 54 nt, Homo sapiens
cacacgaaagagaagccccggaggaggaaaccaaacagagcaccaaagccccac

SEQ ID NO: 257052 - RNA, 112 nt, Homo sapiens
gagcggacggcggcacagggaggaggaaaccgaaggccggcgcaggagcccggcgcagggcacgacggaggagggcggcgacccgagagagggagaaagcggccccccagag

SEQ ID NO: 257053 - RNA, 72 nt, Homo sapiens
cggaggaagaccgggaggaagagggcgcaagggggaaggaagcaggcccaggcgaccagggcgaaggaagaa

SEQ ID NO: 257054 - RNA, 78 nt, Homo sapiens
ccccgccccggggagaagaggggagcagcggccgcacaggaggaaaaggaaaccagacgacaaaagaggaaaaaagcc

SEQ ID NO: 257055 - RNA, 99 nt, Homo sapiens
cggaccagccagagcgagcggcgcgggcccagaccgccgggcaagcaccagagagggcacagaggggaagaacgcacccacaccgaaccaagagagaag

SEQ ID NO: 257056 - RNA, 71 nt, Homo sapiens
gggaacaacaggagggagggacccccgacaaggggggagggaagaacagggacacaccggggcgcgggggg

SEQ ID NO: 257057 - RNA, 81 nt, Homo sapiens
gcagaggccaggaggacgaggagagacagaagaagcggaggccggcaaagccaagggcgggaacggaaaagacaaggaagc

SEQ ID NO: 257058 - RNA, 76 nt, Homo sapiens
cggaaagggcaggaagaccaggaagagcgagggccaccagaacaagcacccgccaccggagcccgcgcggaacagc

SEQ ID NO: 257059 - RNA, 79 nt, Homo sapiens
aaaaagagaagacgcacccgaccgggccgaccacgagaccaggcccaggaaggaacgaggaagggccagaacggagacg

SEQ ID NO: 257060 - RNA, 72 nt, Homo sapiens
cagaaaccaagaaccaacaaccaaagaaaacagaacagaaaaggcgcaacagacccaagaccaaaagagaaa

SEQ ID NO: 257061 - RNA, 48 nt, Homo sapiens
aagcgaccgaaacaccaaacacggcggagggcgaacgaacgcccgcca

SEQ ID NO: 257062 - RNA, 63 nt, Homo sapiens
cagaggcccaacgcagaccgaggcgaagcgcgcagcgccggcggcagcccacagaagcacaag

SEQ ID NO: 257063 - RNA, 75 nt, Homo sapiens
agaaggagggggaacgccaggaagagaaaaagagccacagagaggcggccgcagagaacaacacccaagcaaacc

SEQ ID NO: 257064 - RNA, 86 nt, Homo sapiens
ccgccgggagcggaaacagcggcagccagagaaccaagccgccacagggagaaaagagcagaggccgaccccaggacacgacgggg

SEQ ID NO: 257065 - RNA, 52 nt, Homo sapiens
ccccccagagagcaaacaccacacacaaagaggaagccagacgcgagggccg

SEQ ID NO: 257066 - RNA, 86 nt, Homo sapiens
cgccgcgcagcacccagacagcaccacgcccggggggacgcccccaccacaccgggaggagaagcaaaagcagcggcaagaacgcg

SEQ ID NO: 257067 - RNA, 69 nt, Homo sapiens
agcagcacagcaagccacagagagggccggcagggcgggcagagcaggcaggaggcagacgaaggagag

SEQ ID NO: 257068 - RNA, 77 nt, Homo sapiens
gccggaggaccccaaccgcccaggaaacagcccaaaaccgccgcgcgcgaccaaaggaggcccagccacggcccccg

SEQ ID NO: 257069 - RNA, 65 nt, Homo sapiens
gggcggcagcgcgacggggagcggcggagaccgcccgccccgccgggggagaccgaaggaccacc

SEQ ID NO: 257070 - RNA, 70 nt, Homo sapiens
cccgacgaaacagacccgaagagaagcccaaagacaggaagaaccgagaacaccgaccgaggacaacagg

SEQ ID NO: 257071 - RNA, 57 nt, Homo sapiens
cagaggcagccagaggccaccagaccgccagaaaaaagggccgcggagagcggggcc

SEQ ID NO: 257072 - RNA, 63 nt, Homo sapiens
gaaagagggggaagcaccaaaagagaaacagccacccagcgacgggccacgaagaggaagcag

SEQ ID NO: 257073 - RNA, 63 nt, Homo sapiens
ccgaggaagcgcgggcggacgacagaggagccgaaccacccaaggcgaggggacggcggggag

SEQ ID NO: 257074 - RNA, 81 nt, Homo sapiens
gaaagcaaacacagaagacaggagcccaggaaacagaaagacacggagagaagagacgaggaggaggggagaccgcggcag

SEQ ID NO: 257075 - RNA, 77 nt, Homo sapiens
agcgcgggacccagcccaggcggcgcggacggggcgggaacgggaacagaacaaacgggaaacaggaaccaagccag

SEQ ID NO: 257076 - RNA, 51 nt, Homo sapiens
caccaacacccaaagggggagccagccaccgagacgccgacagcccgacgg

SEQ ID NO: 257077 - RNA, 72 nt, Homo sapiens
cggaagaaggaggccacacgacagagaagagcgaacgaagcggaagcaccagaaaacagccccgaaccagaa

SEQ ID NO: 257078 - RNA, 81 nt, Homo sapiens
gggagcacgcacccacgaggacgcaaacagcagacggaagaccccacggcaaaaccacacccgaggcgagcccaggacacc

SEQ ID NO: 257079 - RNA, 56 nt, Homo sapiens
caccagagaggaggagcaagacagagagaggggcgcgaaccaggaaaaaccggagc

SEQ ID NO: 257080 - RNA, 67 nt, Homo sapiens
ccaaagaaagcagcgaaaacaccccacgccggagccagcgacccacgaggcggcgggccagagaagc

SEQ ID NO: 257081 - RNA, 80 nt, Homo sapiens
ccacacccaccaacaacaccacaaaaccacagccaagccgggacaccacagcaagaggaacgggcacgccagaaaagacc

SEQ ID NO: 257082 - RNA, 74 nt, Homo sapiens
aacagagacccaagcccagaagccggaaagaaaaagccggccccagcagccgagcggaacaacaagcccggaag

SEQ ID NO: 257083 - RNA, 80 nt, Homo sapiens
cagagacgaccagggaggagccgggccgaggggacgcagaagaccagaagggcagagcacgggaaccaccccagagcagg

SEQ ID NO: 257084 - RNA, 80 nt, Homo sapiens
gacagacaagacaagaccggcggggaagcggccgaacaagcaaccggaaaagcaaaggcaagggcagcaccagcagcccg

SEQ ID NO: 257085 - RNA, 76 nt, Homo sapiens
cgggcccgcagcccgacccgaggagcgcgggggcggcccgccccggacccgagcagagggaaccgagaccagagca

SEQ ID NO: 257086 - RNA, 88 nt, Homo sapiens
ccgcagcaggcagcccccggagccccccgggacccacagcaccccgaggcccgacccaggaggaaagagccaaccagacagccaggaa

SEQ ID NO: 257087 - RNA, 113 nt, Homo sapiens
cccggcaccgccgcccacgagcgaagcaccgcagccgggcagacacacgacgagaaccggacaagcagaccggaagaccgacggaagaccacaccccgagggagcccaggaca

SEQ ID NO: 257088 - RNA, 77 nt, Homo sapiens
aaggaagaccgaggaagccaggaagaaggcacgaagcggggccaaaaagggagaccggcgacggccggcgacacccc

SEQ ID NO: 257089 - RNA, 83 nt, Homo sapiens
gacccaacgcaggccccgcaaagacggcacgcgggacgaacaccgcacaggcaggaggcaggccaagaccgacagaacaagcg

SEQ ID NO: 257090 - RNA, 64 nt, Homo sapiens
gacgcaaaccaaggacggggaccgcacacccaaggaaacagcccgaacgcacagaagaaaccag

SEQ ID NO: 257091 - RNA, 66 nt, Homo sapiens
acccgcgacccgggcacccagagcagggagggaaccgaacaagacagaaagcgggacgcgcaaccc

SEQ ID NO: 257092 - RNA, 66 nt, Homo sapiens
cacgcacagcaaggcagaccagcaagaacagagaaggcaacgaaggacggggaacagcgggcagca

SEQ ID NO: 257093 - RNA, 72 nt, Homo sapiens
aagaacagaagaagaaagcagggggacgcaaaggccaaggggcggcaaaaagggaaagcaaaaccagcaaac

SEQ ID NO: 257094 - RNA, 79 nt, Homo sapiens
ccccacgggacaagagggaggaggacaagaagagaccgaccccggacgcaaggaccaaaaaacaaagggcggaaagaag

SEQ ID NO: 257095 - RNA, 76 nt, Homo sapiens
ccacggaaaccacaacggagccgacagacaaacaaggcaccacagacagaccgaaaaaacgagaagacaaacggcc

SEQ ID NO: 257096 - RNA, 85 nt, Homo sapiens
accagcagcgcgggagagcggaccccccgccaccgcccgagcccaggaaaacagccacaggaagaagcacagagaaggggcccga

SEQ ID NO: 257097 - RNA, 86 nt, Homo sapiens
cgcgacacacaaggcccacgaggcgcacaagagcagagcaccccgcaggcccggcgcaaggaagggagaagaagacggcacgggac

SEQ ID NO: 257098 - RNA, 54 nt, Homo sapiens
cccggagcgacaaggacccaccaagaaccacacaagacccggcgacacagcagg

SEQ ID NO: 257099 - RNA, 83 nt, Homo sapiens
caaccccaaggaggacgagggccgggccgggcgcgggcgagaaagggcacagaacggcacccacgaacccgccgagagagaag

SEQ ID NO: 257100 - RNA, 79 nt, Homo sapiens
ccccgggagcgcccgggaagggggacagacagaaaagcgaagagcagagggaggagaggacgaccggccacgcagagac

SEQ ID NO: 257101 - RNA, 47 nt, Homo sapiens
ccaccgccagccacccacgccagcagaggaggaagacgcacgccgga

SEQ ID NO: 257102 - RNA, 71 nt, Homo sapiens
gccagaaaagcgaggaggggggaaagcaggggagaaaagaaaagaaagacgggaaagaagcgcaaagcaga

SEQ ID NO: 257103 - RNA, 71 nt, Homo sapiens
gagagacaacgagggagaacagaagcaggaaggaagcgagaccgcagcagcccgaaagagaagagacaagg

SEQ ID NO: 257104 - RNA, 53 nt, Homo sapiens
ggaggagggacggacaacccgacaacgccagagagagaagacgacaccagagc

SEQ ID NO: 257105 - RNA, 70 nt, Homo sapiens
acaacaaccacaccacaagagaagaaccaaaaggcggcgccaggacaagggccccacccaaccagaagcc

SEQ ID NO: 257106 - RNA, 74 nt, Homo sapiens
agagaaggacacgcaaaccaccaacaccagccggagagccaaagcgaagcgcgaacgcagacacggaaaaggag

SEQ ID NO: 257107 - RNA, 68 nt, Homo sapiens
caaagacagcgaggacaccccagcaagcccgaaacaaagcaccaagccggcaggggccgcaccaaaag

SEQ ID NO: 257108 - RNA, 63 nt, Homo sapiens
ccagggcagcaagaacccagaagaccggacaaggagcgcaggcccaggggggcgcagacaagc

SEQ ID NO: 257109 - RNA, 79 nt, Homo sapiens
aacacgagcgcgccaaagcggaggaccgcagaagagccccgccagagaggcggaggaaagccgcagcggggagaagccc

SEQ ID NO: 257110 - RNA, 74 nt, Homo sapiens
cgcagacgcgaccagaagcgagaaacgggagccagaggagaccagcccgccgcacccagggaaaaacagccggc

SEQ ID NO: 257111 - RNA, 85 nt, Homo sapiens
cgcccggagcggccgcgagccaccgaggcccaggggcaaagaaaaaggagagaaaaagaggcaaaacaacaagaagaaaagagaa

SEQ ID NO: 257112 - RNA, 59 nt, Homo sapiens
acccggcggcacaccccaaagaacaccccggggacgaaacaggccaacggagaaaagaa

SEQ ID NO: 257113 - RNA, 70 nt, Homo sapiens
gggaacgggaaagaacagagaaggaggcaaggaggccacggggccgaagacaccaaccgggcaccagcca

SEQ ID NO: 257114 - RNA, 75 nt, Homo sapiens
aaaagaacccgccaaaacacagcgaggagacagagaaggaggggcagagggaaaaagaaaagaaacaagacaacc

SEQ ID NO: 257115 - RNA, 75 nt, Homo sapiens
aaagcaaaaagaaaaaaaaggaacggaaaacagagaaggacagaaaacgggccccagacacaagccccaccaaga

SEQ ID NO: 257116 - RNA, 65 nt, Homo sapiens
acagcaggaaagaagggggaacaacgaggaagggcaacaacccagacaaacaaaaacccggggca

SEQ ID NO: 257117 - RNA, 103 nt, Homo sapiens
gcggcgccgagcgaacggggagccgagcggagcgccgcggcgcagccaggacaaacaacagaccaaggggcggaaaacccgaagccaggaacagcggcaagcc

SEQ ID NO: 257118 - RNA, 87 nt, Homo sapiens
caccagggcagaaaagagacagccaggaagcagagccaaaggacgaaggaccagaagggcagcaagcccgccagggccacccgcagc

SEQ ID NO: 257119 - RNA, 80 nt, Homo sapiens
agcgacgagcaggcggcgcagacaccaacgcgggcgcgaccgggagcggaccccgggggagcgaggcggccagggcccca

SEQ ID NO: 257120 - RNA, 70 nt, Homo sapiens
gccccccagccaggggacgaccgcggcaagcgggagcggacccacccaagccaccgaacccggcccgacg

SEQ ID NO: 257121 - RNA, 71 nt, Homo sapiens
ccagaagagaaaacgagaaacacagcacaagaggggagaaaaccagaggggcaaggaggagccccggagga

SEQ ID NO: 257122 - RNA, 81 nt, Homo sapiens
cagaggcggagcccgcagaccgcagaaggccggagacaccagcagggaggcgccggcgggaccgcgggaaggcggggcggg

SEQ ID NO: 257123 - RNA, 78 nt, Homo sapiens
acagaggagaaggcggcccaccccagagcaccggcacgccacgcagagccccgccaggaagacacgccggggaacgaa

SEQ ID NO: 257124 - RNA, 79 nt, Homo sapiens
agcaacaaaaagaccacagacagcccggaccgacaggaaagaaggagcccacaaagaaaagaacaccgccagcagccag

SEQ ID NO: 257125 - RNA, 50 nt, Homo sapiens
cgccagagggaacaggggaaagcagcacaaacggcagaacgaagcccccg

SEQ ID NO: 257126 - RNA, 70 nt, Homo sapiens
aaagaacgggagcaaggaccgccagaagcacaggaccagggagacacacaccagcgcacgcggacgccgc

SEQ ID NO: 257127 - RNA, 79 nt, Homo sapiens
ccggagccaaccaagacgaaacaggaacacgaaagaggaaaaacgcacaagaaaccgaagccaaggaggagaggaggag

SEQ ID NO: 257128 - RNA, 58 nt, Homo sapiens
gacgcagagccccggaaagacccaaggggcaaacacgaaaagagacaagagagaaaac

SEQ ID NO: 257129 - RNA, 75 nt, Homo sapiens
gcgaggcgagacccccgcccacgcaaacccaaagaccccgccggagacgagagagccggcagcgcccgagggagc

SEQ ID NO: 257130 - RNA, 81 nt, Homo sapiens
gccacccacgccccggcccgcgcaccccccagggcacaggaggccagcagaagagaaaccggagaaaacaggaaggagaaa

SEQ ID NO: 257131 - RNA, 71 nt, Homo sapiens
gacagaccaaaaagggggcaaaaaagcccacagggacacaagcaggcaccaccacagcaaaaaaaacaggg

SEQ ID NO: 257132 - RNA, 38 nt, Homo sapiens
agaaacagagaaggaacagagacccaggccacagaagc

SEQ ID NO: 257133 - RNA, 60 nt, Homo sapiens
aaagcacggggaggcaacagggagggacccaccgagaaccaccgaaggagacacacaagc

SEQ ID NO: 257134 - RNA, 75 nt, Homo sapiens
ggaagagcccgacccaggaggacggcagcggacgaccccagggagaggcccagacgacgcagagaccccccggca

SEQ ID NO: 257135 - RNA, 73 nt, Homo sapiens
accacaccaagagacccaagaggacgaaacagggggcgacagcagaacaagaccagagaagccaaggaacagc

SEQ ID NO: 257136 - RNA, 89 nt, Homo sapiens
gggcccggaaccgggaccagggaaggaagggacggggcagaaacagaagaaggaggaaggcgaacaaggaccgcgacaccaacagcgac

SEQ ID NO: 257137 - RNA, 64 nt, Homo sapiens
cacaggggcagaaccaggccaaacaggaccaagaaaggcccagggaccaaagcccggacaaggc

SEQ ID NO: 257138 - RNA, 73 nt, Homo sapiens
cgggacaaccacgcccggccacgggcggagaacggaaaagcaccaggaagcagagaggaccgcagaagggaag

SEQ ID NO: 257139 - RNA, 71 nt, Homo sapiens
caccaccaccaccccggaaaccagggaaaggaagacaggacgcgccaacgagacagcaagacaaaccagag

SEQ ID NO: 257140 - RNA, 92 nt, Homo sapiens
agccccccccagcaggcgccggcggccgacccaaggaccaggccccgcaagccggcacagccacaccgagaagaccggcccaagaaccccac

SEQ ID NO: 257141 - RNA, 82 nt, Homo sapiens
cgcgccccccgcccgcccgggccgccagaaacgaaggaggcccaaccacaaaaggagccgacggaacccagacggagaacaa

SEQ ID NO: 257142 - RNA, 78 nt, Homo sapiens
aagaagaccacagagggacccggacaaccagaggcagccagcagggggagaaggcagagggggcgagggaggaaaggg

SEQ ID NO: 257143 - RNA, 78 nt, Homo sapiens
agagccggccgaacgggggagcgggcaggcagaagaaggggaacccgcgcccaccaggacagaaggcgacacaggcag

SEQ ID NO: 257144 - RNA, 81 nt, Homo sapiens
gcaacgcaggccagcaaccccagccaagcaaggaaaaaacccaggaccaaaacagagaaaggagaccaagcgaagaacacc

SEQ ID NO: 257145 - RNA, 71 nt, Homo sapiens
gcaccaaccgcgcgcaccgccgacccggaagaccgccgccggcacacagagaaaaaaagggaacaaaacac

SEQ ID NO: 257146 - RNA, 47 nt, Homo sapiens
gcgccgcgccgcaccccgagcgaccggcccagcaggccaaggcccca

SEQ ID NO: 257147 - RNA, 71 nt, Homo sapiens
aagcggccccacagaggcggagcgagaagacagaaaggcgaaggaacagcagaggcagaaacccacgggac

SEQ ID NO: 257148 - RNA, 75 nt, Homo sapiens
caggcgccccaaaccgcccaggccgagagggcaccaggaggcccagcccaacaaagccagcgcagcagaccaagg

SEQ ID NO: 257149 - RNA, 96 nt, Homo sapiens
gcgaaaaacggagccaaaccccacccacagcggagacccaggcaaagaaaggcagaagagaggcaaaaacaaaggaaggaaaggaaaacgaccccg

SEQ ID NO: 257150 - RNA, 71 nt, Homo sapiens
acgggaggcgcagaaagaggggccaccacagagcccgcagggacacagcagaacaagcaacccccggcacg

SEQ ID NO: 257151 - RNA, 82 nt, Homo sapiens
acgcaggagacacaagaagcggaccaggcccggccaacgcaacagggagcccacgcaagaggggccggggaccgcccagcag

SEQ ID NO: 257152 - RNA, 101 nt, Homo sapiens
gcaggaggacgagcaccaggacacgggcggagccaggccgaagaacaggagaaggaagaacaaagaaagacagaggaaaggagaaacagaacaagaacgac

SEQ ID NO: 257153 - RNA, 66 nt, Homo sapiens
cccgagccagccccgacagcgggaaccgcaaccaagggcagaccgcacaagcagccccggaacaca

SEQ ID NO: 257154 - RNA, 54 nt, Homo sapiens
agcggaggcgacacccagagagcccagaggaaaccagacgaaacaacagccaaa

SEQ ID NO: 257155 - RNA, 78 nt, Homo sapiens
cagggaaggaaaccggagagcgcccacgccccgaccggaaaacccgaagacccagcgcaaccgaaccccccacgccca

SEQ ID NO: 257156 - RNA, 93 nt, Homo sapiens
caggaggaggacgggccagggccccgcagaagcacccggagaacagcaccaggaaaggaagagcgagccagaaggacacggagccaccggaga

SEQ ID NO: 257157 - RNA, 72 nt, Homo sapiens
aaccaaaaagaagggagaaaaaaggaccagagccagacacgaaggaggaaacaaaccgggccacggaaccca

SEQ ID NO: 257158 - RNA, 84 nt, Homo sapiens
gcgaaggccgggacccggccccggcccacaggggggggcaaacccgagagaacgggcaacaccaccgagaacggggaaaaagac

SEQ ID NO: 257159 - RNA, 40 nt, Homo sapiens
cccccaaagcacgggaacagacggaccgaaagggcagaca

SEQ ID NO: 257160 - RNA, 72 nt, Homo sapiens
acgaagagagggaaaaaccgacacacaagaaaccaggagaaccagcagaagaaacagccaaacaagaagaag

SEQ ID NO: 257161 - RNA, 71 nt, Homo sapiens
agaaggcagggaaacaacggcgccagagcgagggccgcggagacgacgccgccagaggaggcacacaaaca

SEQ ID NO: 257162 - RNA, 85 nt, Homo sapiens
cgaggagcacgggaggagagaggaggaagacgagggcccgacgacgagaccgcaaccagagacgcccggcacgaggaggaggacg

SEQ ID NO: 257163 - RNA, 63 nt, Homo sapiens
ggccccacaccaccgcacgcgcgcccgccgcccgaggagccccgcgcgggaaaagccgggcca

SEQ ID NO: 257164 - RNA, 57 nt, Homo sapiens
accacccacgcaggcaggcaggaagagaacacagaagaagaggagaggaaccagcaa

SEQ ID NO: 257165 - RNA, 75 nt, Homo sapiens
ggagggggaaggaaagggagaaacaggaaacaacccgcaaaacggaagaaaagccaaccggaagcaagaagcaga

SEQ ID NO: 257166 - RNA, 73 nt, Homo sapiens
ggggcgcaaagggaggggcgccgacgaccggccaggaaaagccggccacgcaggggaagcaaggaccagaagc

SEQ ID NO: 257167 - RNA, 64 nt, Homo sapiens
cccgggcagaagaggcgggagagcccgccgacagcgcgaggaaaccccccaggcaagaggcgca

SEQ ID NO: 257168 - RNA, 72 nt, Homo sapiens
aacaaagccaaggaaaccccaacacagagccaagcgccaaaggaagcgggaacacacaagaaggccacccaa

SEQ ID NO: 257169 - RNA, 79 nt, Homo sapiens
ccaggggagagggcgggcccacagagaggagcagcccaccaggacaaaagaagggcagcacaaaggaaagccccaaacc

SEQ ID NO: 257170 - RNA, 61 nt, Homo sapiens
ccggaggcgggagccgcggcggccgggaaagcaccgggaggaaagagagccacacgaagaa

SEQ ID NO: 257171 - RNA, 80 nt, Homo sapiens
gcacacgaaaagagagcagaaggagggaggaaggccccacaggcaacggacaaaggagaaaaaggaaaccaggcgggaac

SEQ ID NO: 257172 - RNA, 78 nt, Homo sapiens
ccggaaccgccgggccgaacagcagacgccgcggagaacacacaaccaaggccacgagaacgcacacggaggcaccga

SEQ ID NO: 257173 - RNA, 77 nt, Homo sapiens
gagagagagaaggggagaaagcgacgcacgaccgcgcgaccgggccggaccagagaaaagcaccaagggaaaggaaa

SEQ ID NO: 257174 - RNA, 59 nt, Homo sapiens
gacccacgaaggaagaaggacacagcaacagagaggaccaccgcacgacaaaccacggc

SEQ ID NO: 257175 - RNA, 76 nt, Homo sapiens
cgggcagacgcggggacccggcgcggggcgcgggacgacgaaggcgagccggggccagcgagcgcggggccccgcg

SEQ ID NO: 257176 - RNA, 55 nt, Homo sapiens
aaagcagaagggaagagagggcaaccgcacacaaggaggccccggcaggccaccc

SEQ ID NO: 257177 - RNA, 79 nt, Homo sapiens
gagaccagcaccccaagcacacccgcacgaggcagagaacaagacggacgcaccgacggaacagaaagcaagacgccac

SEQ ID NO: 257178 - RNA, 84 nt, Homo sapiens
aagaacagaagaaacaaaaggccaccgaagaggaaaaggggaagaaggagaccagaaaagcagagcagacagcgacaagaaggc

SEQ ID NO: 257179 - RNA, 114 nt, Homo sapiens
agacaagcagaagagcaggagcagccgagcaggcagcacaagggagcaacaaaaaaacggcccacagacaaggcgggcaaaaccaggaaacagaaaaaccaggagcgaggagga

SEQ ID NO: 257180 - RNA, 63 nt, Homo sapiens
ccggcccacaggggggggcaaacccgagagaacgggacgagaacccccgcgaaccagaggaac

SEQ ID NO: 257181 - RNA, 73 nt, Homo sapiens
ccgcgcccccggagcaggccaagagacggagcagcagagcacccagaagcacgaaggacacagcaacccgcag

SEQ ID NO: 257182 - RNA, 70 nt, Homo sapiens
acaacaagcgccgaaacacagaagcccaccacggaaacggcgaggcgggaaaaaggaagaggacggcgca

SEQ ID NO: 257183 - RNA, 80 nt, Homo sapiens
accaagaggagagagcccacaggacgggcaggacaggaaaacaggaggcagaggaacaaaaaaagacaccacgagaaaca

SEQ ID NO: 257184 - RNA, 90 nt, Homo sapiens
cggcgagccgaaaagcgagcgcgaggaaaaggcggcgggaggcgacacaccaaagaaaaaacacaccaagcagaaacggagccaaggggc

SEQ ID NO: 257185 - RNA, 65 nt, Homo sapiens
acagccagcaagaggaaaagcaacaggaaccgagcagggggggaccagagaaggcagaagcgcac

SEQ ID NO: 257186 - RNA, 52 nt, Homo sapiens
aggaaggaaccagccaaaaagcaagggcaagggcgcagcacgcagacccgca

SEQ ID NO: 257187 - RNA, 71 nt, Homo sapiens
agaacccaaacgaacccaaaggccccaacaagaagagacaggggaaacaagcaggaccaaaggaaaccacc

SEQ ID NO: 257188 - RNA, 78 nt, Homo sapiens
aacagcggaaacccaccaacagcagggaccagaagacacggaacggacaggaaaacaacgaagagaacaagagacgac

SEQ ID NO: 257189 - RNA, 77 nt, Homo sapiens
gacccacaggcgggagcccggccaccggccggcaacccaaggagacggcgcgggggcggagagggaaagagagccca

SEQ ID NO: 257190 - RNA, 47 nt, Homo sapiens
ggggcagacagccccacaaaggagaaacaaagggagacggacccgcc

SEQ ID NO: 257191 - RNA, 70 nt, Homo sapiens
acgcgcagccgaagcgagcgaacaaccaagaaacagaagggaacccgagaaaacccgaggagagagccca

SEQ ID NO: 257192 - RNA, 119 nt, Homo sapiens
ccagaccgacaccgcagagcaaggaaaagagcccggaaagaagagacagcgaggagacaacccccagaacaaagggcaaaggacacaccgcacaaacggccgcgcaccacacaacacca

SEQ ID NO: 257193 - RNA, 82 nt, Homo sapiens
ccgggaggaaggaacgaggcaaggagcaaagcagcggcgcagcccggggagaagacagaggagccagaccaagagacagcac

SEQ ID NO: 257194 - RNA, 70 nt, Homo sapiens
gacgcccaaacggaacagcgagacacgggacaaaaaccaaaggacaggaaacggagagagaaaaggagaa

SEQ ID NO: 257195 - RNA, 68 nt, Homo sapiens
gaaaaggagaagcaaagagaaacacaagagagaaaaagaccgcgagccgaagggccgaaggaagcaca

SEQ ID NO: 257196 - RNA, 78 nt, Homo sapiens
ggccagcaccgcgcccaggcagagccagaccacacaggccccacgggcccagagggggagcagcagccagccgagaac

SEQ ID NO: 257197 - RNA, 79 nt, Homo sapiens
ggacgcgccggaggaacaagcgagagagggggcaccccagacaggagaacgggacagggcagacgggaggagagaaaga

SEQ ID NO: 257198 - RNA, 84 nt, Homo sapiens
aaagcacgaacaaaggaaaccagacccagaggccaacccaaagaagcgccaaggaagagcgaagaagcaaaagaagaagaagaa

SEQ ID NO: 257199 - RNA, 57 nt, Homo sapiens
gcaggaaccaccaggacagacagcacaggcaagggcggaggacgaaaaggaacaagc

SEQ ID NO: 257200 - RNA, 53 nt, Homo sapiens
aaaaggaggaccaacaagcacaaagacagaggcgcagggagcaggagaagcgg

SEQ ID NO: 257201 - RNA, 76 nt, Homo sapiens
cgaacagacgagaaagagccccccaagagaacccagggggagccacgccggagcgggcaccggcgcggacccaccg

SEQ ID NO: 257202 - RNA, 81 nt, Homo sapiens
aaaggcagccgcggacgccgcgccagcgacaaacaagagcaccaagacagggccaggcacccagccccccaagaccccaga

SEQ ID NO: 257203 - RNA, 72 nt, Homo sapiens
ccgacgcgaggggacaaaggcgcaagcgagaggaaacgggccccaaggcgaccggagccaaaaggagaagcg

SEQ ID NO: 257204 - RNA, 77 nt, Homo sapiens
ggaaggaagggacaagacccacagcaaagccagcgacagaagccaggcagcagcaagaagaagcagaaagacaccag

SEQ ID NO: 257205 - RNA, 54 nt, Homo sapiens
gaaaacccgacccaaccagccaaggacccacgggggggaaaagcccaaaggaac

SEQ ID NO: 257206 - RNA, 70 nt, Homo sapiens
cggcccagccccgacacaggacaaaccggcgaccacacacggggacgacggggaagccggacagcaagcg

SEQ ID NO: 257207 - RNA, 75 nt, Homo sapiens
gacgccggagcaaacgacgagaaagcccacagccaaagccgggcggacgcggagacggaccagcagcacggcaca

SEQ ID NO: 257208 - RNA, 83 nt, Homo sapiens
gccacgacccacgagacaggggcccaagaaaaagcaccggacgaaaaagaacagaggccaacccgacaagaggaccaaggcca

SEQ ID NO: 257209 - RNA, 81 nt, Homo sapiens
ggagaccaccgcggcgcggcagcgcgcccgagacacaacgagggcaacaccgcgaaaggcagcggaaaaccggacgcggaa

SEQ ID NO: 257210 - RNA, 81 nt, Homo sapiens
gggcgccgagccgcaggagagacacgcgggccgaccccagagaggcgcggacagcggcgagcacgggcgggcacgccggcg

SEQ ID NO: 257211 - RNA, 78 nt, Homo sapiens
ggaagaggggaaccaaagagagcgcccagagaagaacggaaaacagccccaaagcagcagaccgaagaaagaagaccc

SEQ ID NO: 257212 - RNA, 71 nt, Homo sapiens
accaggccgacaaagaccacaggagaagaagaggaaagaggaaaaacgaggcaaagaggaacgggaaaaca

SEQ ID NO: 257213 - RNA, 85 nt, Homo sapiens
gcggacaacggagaccagaccacgcagccacgcgggcgagcggcggggagcggcgaagccgcgggcgagaagaaaggaccaggcg

SEQ ID NO: 257214 - RNA, 75 nt, Homo sapiens
gacggccggcggcacccgcacccggggacaagcgcgggaacggcgcggaagaacgccaaaagacgaacacaaagg

SEQ ID NO: 257215 - RNA, 55 nt, Homo sapiens
ggagggagccgacggaaaccaaggccaaccagggagacagaagccaggaaaaagc

SEQ ID NO: 257216 - RNA, 78 nt, Homo sapiens
gccgcccgggagcgagcggaggagcaggcgccggaggaccgcggcaagcgggagcggacccacccaagccaccgaacc

SEQ ID NO: 257217 - RNA, 74 nt, Homo sapiens
gcaccacaaaaaggacaggacagcaaggcggcaaggcgggagaccagagagacccagcgggggaggcccacagg

SEQ ID NO: 257218 - RNA, 82 nt, Homo sapiens
cccgcggggcggaccggagaagccccgagcaccccacagcacagcgagcaggcgagagaccgcagcggcaggagccccgggg

SEQ ID NO: 257219 - RNA, 75 nt, Homo sapiens
aggccgggcaggaagaaggcaacacccaacccgaagcgacgcaaggaaagaacagcagagaacaaaggaccgcaa

SEQ ID NO: 257220 - RNA, 71 nt, Homo sapiens
ggagaacaagaacgggcacgggcagacacccacgaacgccacaggaccgcaaacccgaagagaaggaaaaa

SEQ ID NO: 257221 - RNA, 82 nt, Homo sapiens
ccgagggaaacacacccacaggggccaggcggcaacagaggaaaaggacaaacgcgaaaacggccagagcgacgccaggaag

SEQ ID NO: 257222 - RNA, 77 nt, Homo sapiens
cccgcggaggggcagagaacacccccccagaaaccaacccaaggccggggggggcacagagccccggaagacagccc

SEQ ID NO: 257223 - RNA, 73 nt, Homo sapiens
aaccaggggcggaaccagcaagacccccacagacgagagcaagaaagaacaggccagacaaacagcgaagagc

SEQ ID NO: 257224 - RNA, 77 nt, Homo sapiens
gcccggcgcagaaagaggagcgaggggcaaaagaggagaagagcaggcccagaaaaggcaaaaacggcccaacaggc

SEQ ID NO: 257225 - RNA, 123 nt, Homo sapiens
ggccgggccagccccccagcgacccacagcgacaaaggcagcagcaggacgcacgggaagaagcgccaacaagagcgaagacaacggacaggaaccacccaaaaaggggcaggagagcaccac

SEQ ID NO: 257226 - RNA, 57 nt, Homo sapiens
ggggacacggcagagccgagaagacccagagcaggacggacaccgaaccggcggcga

SEQ ID NO: 257227 - RNA, 76 nt, Homo sapiens
cgagcgccaggaggaggaagaccgaccgccgccgcgcaccgcaaggacgcgaaagaagacagacccagagagaaca

SEQ ID NO: 257228 - RNA, 78 nt, Homo sapiens
gccggccgaaggcccgagcgcccgaggcgcgggaggggggaccggaccacacgaaggggcagaagagcacaagacgga

SEQ ID NO: 257229 - RNA, 56 nt, Homo sapiens
gacgggaggaccgggagcacagggccaagacccgcagccggggccggagagggcgg

SEQ ID NO: 257230 - RNA, 50 nt, Homo sapiens
cccaaagccccaccccacaagcaaagaagagagaagcccggacccggaca

SEQ ID NO: 257231 - RNA, 80 nt, Homo sapiens
gaagagggaccacaaggcaccaagcggggggggaaaacgcccaggcccggaggcgcagcggagcgcgcgaagggaacccc

SEQ ID NO: 257232 - RNA, 90 nt, Homo sapiens
ggccagcgcggccgggacacgggcgcgcggccggggacccgcgcgagaagacaggggaaccgaccccgacaaggaccgaaaggaccggag

SEQ ID NO: 257233 - RNA, 79 nt, Homo sapiens
gccaacccaaagcccaaacggaaccaaagaccgagaacaggaagaacggaagaagcagaagggaacgacaggaaaagaa

SEQ ID NO: 257234 - RNA, 71 nt, Homo sapiens
cgccggcccagcgggcggaaaacgaaaaggaagcaagacaccacgcaaacaaaagaaaaccaaaaagcgaa

SEQ ID NO: 257235 - RNA, 54 nt, Homo sapiens
caggacacgcaagagcgggcgaggaaccaaagccccggcgcgcaacagaagagg

SEQ ID NO: 257236 - RNA, 73 nt, Homo sapiens
cacggccaacaccagcacgacggacaagagaaggacggagaagcgaaagccagaccggcaagagcggaagaaa

SEQ ID NO: 257237 - RNA, 78 nt, Homo sapiens
gcgcgcgggcgaccgcgggagcccagcggcggaggacaacaccacgacccggagacgggcagccgaaccggcgagggg

SEQ ID NO: 257238 - RNA, 81 nt, Homo sapiens
ggccaacccagaaccccagcaccgaaagggaccgaaaggagagcaaagggagggcagaacgacgaaagacggacaggacga

SEQ ID NO: 257239 - RNA, 77 nt, Homo sapiens
cagcgccaccgacccggaaaaagccaaaccacccaccgcccccaagggcaaagcccagagcaagcccggaaaccgga

SEQ ID NO: 257240 - RNA, 72 nt, Homo sapiens
aaaaaggggaaaacgaaaaggcacaacaaagaagaaaaaccggaccaagagagagacgggggcaccagagcc

SEQ ID NO: 257241 - RNA, 81 nt, Homo sapiens
ggaagaggcccacccggagaaccccacggagaaccagaggaggagcacggcgaaccgcaaacagaagagggagccagaaga

SEQ ID NO: 257242 - RNA, 120 nt, Homo sapiens
ggaaaagccgaaaagagcccaaggaaaccggacagaggcccaaggaagacagggaaggggcaagccaaccagccggaagaacaccggaagaacaggcaggcgggaggacaaggacaccgg

SEQ ID NO: 257243 - RNA, 86 nt, Homo sapiens
cagcacccaagccaggccggagggggccgggggcggcgcagaggggaagacacccccggacccccacagaccaaagagcagaagac

SEQ ID NO: 257244 - RNA, 62 nt, Homo sapiens
cggcgccgcgccccggccgcacggagaccacaggggcaggaacacggccacaagcggcccac

SEQ ID NO: 257245 - RNA, 79 nt, Homo sapiens
gcgccgaaggacaagaacagcgccgcaccagcaggccacagaaaagaagacccgaagaaagcaggagaaacggcgcaac

SEQ ID NO: 257246 - RNA, 75 nt, Homo sapiens
acaacgcgagcacacccccagaagccgggggccacaagaaagaccacaggaccacggacaaaagaacacgcaaaa

SEQ ID NO: 257247 - RNA, 72 nt, Homo sapiens
cggccaacgccgcgcccgcggagggaaaagcaccagcaaaaccccaggagggggaccagcgcgcagcccaga

SEQ ID NO: 257248 - RNA, 83 nt, Homo sapiens
caggaaggggaccgggcggcggagcggcggaagaaggaggaccgcgccaacaggacgaggagaccgaccaggagaccccagcg

SEQ ID NO: 257249 - RNA, 75 nt, Homo sapiens
ggccgcgagcccccgccgcgccccacgccggcacacacacagagagcaagccccccaccagccccacagaacgca

SEQ ID NO: 257250 - RNA, 84 nt, Homo sapiens
gcacacaaggagacagccaggggccacaaagcgggcacaggccgggcacagcaaaaacaacacccacgagaccaggccaaggag

SEQ ID NO: 257251 - RNA, 57 nt, Homo sapiens
ggaagggccaccagaacacaagcggacaacaaacggccgcagcacccgggaaccgac

SEQ ID NO: 257252 - RNA, 79 nt, Homo sapiens
gagccccacaacacgcaggaaccaacaggaggaaaagccgcagggggccacaggaaaacaagacaagggaggcgaggac

SEQ ID NO: 257253 - RNA, 84 nt, Homo sapiens
gggggcagggagagggcggccgcgacggaaacaacgccagagagccggggcagccccccaccagagaacacaaggaacgaaagg

SEQ ID NO: 257254 - RNA, 81 nt, Homo sapiens
ccgagagcccggacacaagacccgcgcggccacgaccgggagaccaaccaggcacaggagagaaacgggagggcccggaaa

SEQ ID NO: 257255 - RNA, 89 nt, Homo sapiens
caaacaccaccggagaaccgggcggagcagaccagagaagagcacagaagaccagagaggggacacggaaaacgacagaacgaagcaga

SEQ ID NO: 257256 - RNA, 84 nt, Homo sapiens
cgaacggaacaggaggcaagaagcagaacaacgcggaacagacagggcaggaagcccgaggaacccagaagaggaggaagagga

SEQ ID NO: 257257 - RNA, 84 nt, Homo sapiens
gggaggggaggccccccgagcccagagggaaagaaagaacggggcgaccgcgcgccacggaggacagcacgggaaggcgcggac

SEQ ID NO: 257258 - RNA, 75 nt, Homo sapiens
cagccgcccgccgcccgccggggcgcccgagcggcgccgacacgggaagagacgcggcgccggcgacgaggcgaa

SEQ ID NO: 257259 - RNA, 85 nt, Homo sapiens
cgcagaaggaaccggcaaagcgcaggaacgggaacgcaggagcgaccagaacaaggcagaccaaccaccccaccgggccacgaca

SEQ ID NO: 257260 - RNA, 64 nt, Homo sapiens
acacaagaccgcacgacaggcacaggaagacggaaaaagcgagcaaaaaacaaaaagaagggga

SEQ ID NO: 257261 - RNA, 81 nt, Homo sapiens
gggcagcgcgcgcccgagggcgacggcgaccgacgcacagggccgagggcagggacgacgcccagagccgccgggccaggc

SEQ ID NO: 257262 - RNA, 50 nt, Homo sapiens
gacagcgcaggcagcaggaaagaacacagagaaggaaacgacggaaggag

SEQ ID NO: 257263 - RNA, 67 nt, Homo sapiens
cacaccgaagcaacccaaagcacgaacaagcaagcagcccgagggaggacggaacagcacaccggac

SEQ ID NO: 257264 - RNA, 76 nt, Homo sapiens
ccccggaacggcacaggaccgcaaacccaaagaggaggaaaaagaccagccaagccgcccaacagcacaagaagcg

SEQ ID NO: 257265 - RNA, 80 nt, Homo sapiens
cgaccagagcagcagacagaccgagccagaggacggagagagggagccagggaagccccaggaaaccccaaagagccgga

SEQ ID NO: 257266 - RNA, 66 nt, Homo sapiens
gagacaccagcccgaaacaccaccaagggcagcgggggcagagacggggaacagggccacccacac

SEQ ID NO: 257267 - RNA, 76 nt, Homo sapiens
aaacaaacgaagcacccccagagaacccacacaacaagcaccaggagaagggaagaagaggagagagaaaaacggg

SEQ ID NO: 257268 - RNA, 82 nt, Homo sapiens
cgacaggagcacacccggagaagcaggagcccaccggcaggacggccggagcagcagaacaagagcggagaccaagggagcc

SEQ ID NO: 257269 - RNA, 84 nt, Homo sapiens
ggccgggccgcgcacacgccgggacgcgacgccagcacgacccaccgcacgcagaagcggaccagcaccagacagcgaaaaaga

SEQ ID NO: 257270 - RNA, 86 nt, Homo sapiens
ccgggccgggggacccgcccgccaggccaccaagacaagccgagaccaccaggagcagagcggaggcaaccagccaaaacaacgga

SEQ ID NO: 257271 - RNA, 74 nt, Homo sapiens
aacgcagagaacggaaaacacaccgaggaaagcgaacgcgaaaagaaaagccgagagcagccagaccggcgaag

SEQ ID NO: 257272 - RNA, 55 nt, Homo sapiens
acacaggggcagaaccaggccaaacagagcaaagaacgcagaggggcagaaaaga

SEQ ID NO: 257273 - RNA, 71 nt, Homo sapiens
gcaaacggccggacagaaaccagaccagccggcccagaacaggccaaagagcacagggacagaaaaacagc

SEQ ID NO: 257274 - RNA, 75 nt, Homo sapiens
acagaaaccccccccccagccaccaagagaagcgcaagccccggggcagagacacaggacacccacccgccgggg

SEQ ID NO: 257275 - RNA, 87 nt, Homo sapiens
cggcgcggcggcgcccggcccccgccgcaggaccagaaggcaccacaacaccgggcccagcgacccaccggcccccagcgacaagcg

SEQ ID NO: 257276 - RNA, 76 nt, Homo sapiens
caccgcccaagggcgcgccaccgagggagccgaagggaaccccgaggaagcagcgcgcggccagagaaacggcaga

SEQ ID NO: 257277 - RNA, 82 nt, Homo sapiens
gccccggggccgcacccggccgcccggcgccccggggacgccgccccccgggacggaagcacgggaaaccagcaaccccgac

SEQ ID NO: 257278 - RNA, 73 nt, Homo sapiens
gacaggccacagcccgcagaacaaggggagcgaacgaagaaaggccaagagggagagacaaggagaacccacc

SEQ ID NO: 257279 - RNA, 53 nt, Homo sapiens
ggccaggcacgacccggagaaacaacgaacgagcaaggaagggccaaggcaga

SEQ ID NO: 257280 - RNA, 81 nt, Homo sapiens
aggcagggcaaggaaacggccacaagaagccaggagggaagcccagaagacgcacaagagagaccgaccaaaccccggaac

SEQ ID NO: 257281 - RNA, 72 nt, Homo sapiens
cagcggagcagggcgggaggagaccggggaaacagggacgacagaaaaaaaaaagccggggccgcggggaga

SEQ ID NO: 257282 - RNA, 43 nt, Homo sapiens
cggcaaccggggagcccgccagcccaccgggggacggcacggc

SEQ ID NO: 257283 - RNA, 79 nt, Homo sapiens
ggaccgacaccgcagcccccccagcaggaccaaggaaacagcggagggaagcaggccagccccggacaggaagagacag

SEQ ID NO: 257284 - RNA, 76 nt, Homo sapiens
ggaagagaagcgaggccaacagacaacaggcacaaagagagaaggaacacccacagggcagacagagaaagaacac

SEQ ID NO: 257285 - RNA, 38 nt, Homo sapiens
gggaccagcgagcgacagggaacaagggaccaagcaag

SEQ ID NO: 257286 - RNA, 66 nt, Homo sapiens
aagcagcgccagagagcgagcagagaaccacccgaaggaagccgggagccggccgcgagaggagac

SEQ ID NO: 257287 - RNA, 78 nt, Homo sapiens
caaaaggaagccaggaacagaacgaacaggaggcagccccagagcaggaggaggaaaaccagcccaggaagcagcagg

SEQ ID NO: 257288 - RNA, 57 nt, Homo sapiens
cgaaaccccagaaaccgcaggaagaggagcaaaaggccggagggaagaaccacggac

SEQ ID NO: 257289 - RNA, 75 nt, Homo sapiens
gccggcgcgcacaagggcagagggccagagcccagaaaagaagcaggggagcagcaagccgggaaacagcgcgcc

SEQ ID NO: 257290 - RNA, 73 nt, Homo sapiens
gaaaagaacgccccaggagagagaaccgccaacggaccccgaggacaggaaaaacagagacagggaaaacgcc

SEQ ID NO: 257291 - RNA, 57 nt, Homo sapiens
gagggcaccaaccaacccggaaccgcagacccgggcccgagcccccgaggaaagcac

SEQ ID NO: 257292 - RNA, 70 nt, Homo sapiens
cggaaacccagcggcccagccgggaccgcagggagcagaacggaaacagccccgacccccagcaccgcca

SEQ ID NO: 257293 - RNA, 69 nt, Homo sapiens
aaccaaggacaaacaccaccagaagagaagacagacaaggaacagaacaaaaaggaacgggagaagcaa

SEQ ID NO: 257294 - RNA, 82 nt, Homo sapiens
ccaggcggggcgagaccagcggaccgggccggaggagggaggaggagggagagaagaagggagacgccggagacgccagggc

SEQ ID NO: 257295 - RNA, 80 nt, Homo sapiens
agggcggagcagaagcagccaggaaagagagacgagaaagcgccacagccagagaccagaaagagacagcggaaccgaac

SEQ ID NO: 257296 - RNA, 63 nt, Homo sapiens
gcggccacgccgcagcagggggcgaccggagcaaggagcggcacagggggacgcaggccgggc

SEQ ID NO: 257297 - RNA, 78 nt, Homo sapiens
gaaagagacagcacaaaaagaaggggcagaccaacaccacccagcaaaaaccccgacgaacgcgccagggagcgccag

SEQ ID NO: 257298 - RNA, 78 nt, Homo sapiens
gaacccagaggccgcgcgcgcgaagcccacgccgagccgagaggggacggccgccccgcggggaaagcaacggcgcaa

SEQ ID NO: 257299 - RNA, 97 nt, Homo sapiens
ccacccaaggagaagcagagccaagaagggcaaagagagaaaaccaccgagaagaacccagaaaggagcccagaaccagggaacacgagccacccca

SEQ ID NO: 257300 - RNA, 69 nt, Homo sapiens
aaaccagaaagagaacgggacaacaaaagagccacccaaggacagcaagagcagccccggaacggagga

SEQ ID NO: 257301 - RNA, 83 nt, Homo sapiens
ggggcccggcccacgcgcgcacggcagccagcgcaagaggcgggcagcacgcgcaaggcgccaccggaagaaacgggagggga

SEQ ID NO: 257302 - RNA, 78 nt, Homo sapiens
acggcgcgcggcgcgggcgcagacggcgcgaggcgcgggcacaggaaaaagacaagggcagagcagccggggaaaagg

SEQ ID NO: 257303 - RNA, 65 nt, Homo sapiens
gagggccacgaaaagcaagacggaacgcaaaaacagggggagcccaccaggagccaggcagccag

SEQ ID NO: 257304 - RNA, 98 nt, Homo sapiens
cggagagagaccaagggggagcgacggagcgaggggcaggccggacaagcagaccggaagaccgacggaagaccacaccccgagggagcccaggacac

SEQ ID NO: 257305 - RNA, 79 nt, Homo sapiens
ccaggcccggcgcgcaggacagcgggcggaagacggccaagcacccgccgacccccgacgggcaggaggcaggagcgaa

SEQ ID NO: 257306 - RNA, 107 nt, Homo sapiens
gagccagcacacgcgcgccacagggagcacgacgaaaacccccaaccagaagcgccaccggaggaggggagagggccggcacccgagagggagcaggggggcagacg

SEQ ID NO: 257307 - RNA, 81 nt, Homo sapiens
gaggagcggagccacaaggacggaggcggcgaagaccagggacgcgcacacgccagggaaagcaggcaggagggagagcgc

SEQ ID NO: 257308 - RNA, 93 nt, Homo sapiens
gcgggcccaaggcggaggcgccgcccggggccccgcggcgcaggaggcggggagcgcagagcgggcgagcgcgcaaaagagccaacacccagg

SEQ ID NO: 257309 - RNA, 71 nt, Homo sapiens
aggagaaaacacaagggccaagacccgcgcacagcgcagagccagaaggccacgcccaaagcccaccacca

SEQ ID NO: 257310 - RNA, 79 nt, Homo sapiens
caagcagccaagcccagacaagccccagggaagccacagcaccccagcacccagcccggaccgacaggaaagaaggagc

SEQ ID NO: 257311 - RNA, 55 nt, Homo sapiens
cccggcacgccacaaaccaagccaggaccaggaccggggggggccccagcccggc

SEQ ID NO: 257312 - RNA, 98 nt, Homo sapiens
ggagagagaagagaaaaccaacaagaaaaaacccccgcaaacagccccacccggagacacgcccgagccaacccacagcccacggaagcgccagagcc

SEQ ID NO: 257313 - RNA, 79 nt, Homo sapiens
aaaagaaagacacagacaggaagaagaaaagagaagcaccggggaaaggaggccgggcggggggcaaagagccgggacc

SEQ ID NO: 257314 - RNA, 113 nt, Homo sapiens
acaacccgcggggcgcgccgagggaagacgccccgcggacgcagagggcccaacgccccgagcggaagaggcgccgcgacgggaagaggacagagcgccgcgccgggcagcag

SEQ ID NO: 257315 - RNA, 74 nt, Homo sapiens
ggccgagcaaaccaccaggcaccgaccggcgaacaaaaggagagaggcgccgggggagacccaaccagaccagc

SEQ ID NO: 257316 - RNA, 78 nt, Homo sapiens
gaagacgacgaggaagagcccgccgaagagagcgccagaaagagcaaaacacagagacgcggccaacagaaggaacca

SEQ ID NO: 257317 - RNA, 52 nt, Homo sapiens
cagaggaaggagacccccgcccggcacccaggacgcccaccaggagccccag

SEQ ID NO: 257318 - RNA, 51 nt, Homo sapiens
gggacaacacaggacagggcacagaaccaccgaccagaaggaacagggacg

SEQ ID NO: 257319 - RNA, 76 nt, Homo sapiens
gaccgaagaaaccaaaacgggccaggaaggacaacagcagggaaggaaacaccgcacgaagaacagaggaggcaac

SEQ ID NO: 257320 - RNA, 74 nt, Homo sapiens
agaacccacagaggccaaagccgcaggaagacggccaagaggaaagaagaaaaggaagaagagaaggagccaaa

SEQ ID NO: 257321 - RNA, 81 nt, Homo sapiens
gaaggaccaaggcagcccaacagccgagcaggagaggaaaacagagagcacgcaccccgcgccgccgccccccaccaagga

SEQ ID NO: 257322 - RNA, 76 nt, Homo sapiens
acagcggccaagaagacacaaaggacggaggcacgacaccaccccacaacaccgagcaaagaaaagaagagaagac

SEQ ID NO: 257323 - RNA, 79 nt, Homo sapiens
cgggaccacgacaaaaaagcaggcaaaagaaggaccccagcaggaaaagcaaagcaagagaacgcaagaagacgaacga

SEQ ID NO: 257324 - RNA, 78 nt, Homo sapiens
agcaaggaggccccagcggaccgaacagagcggccgcgaacaccgagccaaccccaccaccgaccccgagggcgccag

SEQ ID NO: 257325 - RNA, 69 nt, Homo sapiens
gaagaagaccgcgagggagagggagaagccccagcgaggagcaccagagaaggaagagaagaacaagca

SEQ ID NO: 257326 - RNA, 67 nt, Homo sapiens
accaggcgaggcgcagaaggggacagaacaggccaggaaaccgacggcgcacaggacgaaaaaagca

SEQ ID NO: 257327 - RNA, 82 nt, Homo sapiens
gcagcccgccgcggacggccccgccccgaccaagaagaaggccagaagaaagggccggaaggcggcaaagccacagagaagg

SEQ ID NO: 257328 - RNA, 70 nt, Homo sapiens
cccagacggagaaccgcaggaaagacgggcaagcaggagacaaacccaccaaacgagcaggagacggaaa

SEQ ID NO: 257329 - RNA, 90 nt, Homo sapiens
ggagaaggggcccacgccggcaagaagggggccaggccaccaaacacgacaggagggcaagaccgcccacgaaggaagacaggaggccga

SEQ ID NO: 257330 - RNA, 80 nt, Homo sapiens
gcgcggagccgcgcagccccggagcacggacccgaacacggaagaaagacacgcaggaggccgcggccgagcagcgccac

SEQ ID NO: 257331 - RNA, 76 nt, Homo sapiens
ggggccacgcacggagaagggacgaagggaacccgccgggcggcccggcacccagccccccggcacccagccagcc

SEQ ID NO: 257332 - RNA, 74 nt, Homo sapiens
ggcacccagccccccgcgcgccccacaggcacaggaagccaaaaagcagcggagggcacaaccggaaaaaacga

SEQ ID NO: 257333 - RNA, 78 nt, Homo sapiens
aaccgggcaaggggaaaggggggccggcgcagacggccaaaggacgggacaaagaggagcaagaggggggggcccccc

SEQ ID NO: 257334 - RNA, 68 nt, Homo sapiens
ccaggccgcaaacagcccaaagcaaaaggaaaagcaggcaggggcaaggcagaaagcggcgcgagacc

SEQ ID NO: 257335 - RNA, 77 nt, Homo sapiens
cagggggcccaaacgggagacaacccccgaaggagggagcccaaaggaccagcaggcaaagaaacacgcaagaggag

SEQ ID NO: 257336 - RNA, 79 nt, Homo sapiens
gccccgggccccgaggccccgaccgcggcggagcccgacccacccaaggcggcggcccgacagagaccgacgaagaggc

SEQ ID NO: 257337 - RNA, 81 nt, Homo sapiens
aggagcgggaaacgggagggaaccagcaacaagccggggcgagaccggaccaggacagagagcgggaacggaaggccggag

SEQ ID NO: 257338 - RNA, 81 nt, Homo sapiens
gaggcgggggcgcgcccaacgcaccgaaagacggcggaggccgaccagggccaacaccaaccaagaagaaacacggagccg

SEQ ID NO: 257339 - RNA, 81 nt, Homo sapiens
agggaagcagcccgccgcgccgccccgagcagcccgccagcccaaacacaaaacaggaccagagccagcccgacaaccagc

SEQ ID NO: 257340 - RNA, 93 nt, Homo sapiens
ccagaccagagcgggggcaaacgggcggaggccaggaagcccaagaaaccaagcagaaggcggcagggagcacgcaccaggagcccacggccc

SEQ ID NO: 257341 - RNA, 76 nt, Homo sapiens
cggccgagccggacgcgagggggacggcgcgaagaagagaagacaggaacggcaaagcaaccagaaaggggaccag

SEQ ID NO: 257342 - RNA, 69 nt, Homo sapiens
ccggagcaccggcagacccggggaccgggaaggggacgaagggaacccgccgggcggcccggcacccag

SEQ ID NO: 257343 - RNA, 86 nt, Homo sapiens
cgaacagagcccaggcaaccgaaagaaccagagagcacagagaaagcgggaaacggccaaacagaacaccaacaaggccaaagacc

SEQ ID NO: 257344 - RNA, 82 nt, Homo sapiens
acgggacgaggagagggagggaaccgggcagagggaagagaaagaggaagaaggcgagaagccagagaggcaacaaagaggc

SEQ ID NO: 257345 - RNA, 67 nt, Homo sapiens
gcgcaccggaaaccaaccagggacagaaaccaggccacaagaagacaccccacccaacgggaaagga

SEQ ID NO: 257346 - RNA, 82 nt, Homo sapiens
ccggaaaagaaaacagagcgacgagcaagaagcagcccaaagcgaagacagacgcaagcaaggcagacaggacgaggaaacc

SEQ ID NO: 257347 - RNA, 69 nt, Homo sapiens
aggcccgagggccaaaggccccccgggccgggcacgggcgccagcggcacggcagccccgaacgaccag

SEQ ID NO: 257348 - RNA, 70 nt, Homo sapiens
aaggccccgaaagaaagccgcgaacccaaggcagacacaacaccacaagcaggcaaccagccaggacccg

SEQ ID NO: 257349 - RNA, 80 nt, Homo sapiens
ggcaaagcgcaggaacgggaacgcaggagcgaccaggacccagagagggaccagggccaaagaagagccggggggcaggc

SEQ ID NO: 257350 - RNA, 69 nt, Homo sapiens
gcaacggggaccccggagcccagaagacagagggcgagaggccagcgacccgaggaggccggcccgcac

SEQ ID NO: 257351 - RNA, 63 nt, Homo sapiens
aaggaccaagaaccagagccggaagagcgcagaagccggaagagagccaagccaggcccagca

SEQ ID NO: 257352 - RNA, 73 nt, Homo sapiens
agggcaaccacccccagaacacagggacccggcgggggcaaggaagcacggaggcccgggaacaaggacaacg

SEQ ID NO: 257353 - RNA, 69 nt, Homo sapiens
agaaaagaagagacagcgagaacaaaggagagaggaccacccagaggagcaacgagaaaacggagcgga

SEQ ID NO: 257354 - RNA, 71 nt, Homo sapiens
ggcacccccccgcgcgcggggagcaggccacagaacaggacacggacgaagacacgcacggcccaaagccc

SEQ ID NO: 257355 - RNA, 66 nt, Homo sapiens
cggcccggcccagccacggaggggcggcgcgcgcccaggacccgggcccacacaggacaggacgca

SEQ ID NO: 257356 - RNA, 70 nt, Homo sapiens
cacaaggaccgccggagaaagcgagcacgccccaaggccggcaagcccagccgaggccaacacggcggcc

SEQ ID NO: 257357 - RNA, 70 nt, Homo sapiens
aaagagggagcaccacacaaagagcacagagaccgaaaagggggaagccggccgccaagaggacggagaa

SEQ ID NO: 257358 - RNA, 38 nt, Homo sapiens
acagaaacaaagaaggaccgggcaaggagggacagccc

SEQ ID NO: 257359 - RNA, 55 nt, Homo sapiens
acacaagagagcagggaggaggaggaagaagagaggagacacaggggggagaaag

SEQ ID NO: 257360 - RNA, 80 nt, Homo sapiens
ccagggacgcagaggcgggccgaggacgacagaagcgaaggggacagggggagaaccgccagggaaacccgggggacaga

SEQ ID NO: 257361 - RNA, 41 nt, Homo sapiens
aggaagcccagcaccaacaacaagggggaggcaacaccgcc

SEQ ID NO: 257362 - RNA, 74 nt, Homo sapiens
gcggcggcgcgggggccggccgcgcggacgaaggagacgaagacaggagcgcgaaaggggaacccacagggggc

SEQ ID NO: 257363 - RNA, 82 nt, Homo sapiens
gagcaacaccgagagaggaggagccagacgacaagcacacacaggcgcgaaacggaaaaaggaagaagacggcacgggaccc

SEQ ID NO: 257364 - RNA, 84 nt, Homo sapiens
agccacggcgagcagggcgccgggagagcaccggaagaagcgcggcggaaggccggcaaagcaccaggcacagcaagcgccgaa

SEQ ID NO: 257365 - RNA, 73 nt, Homo sapiens
ggaaggaacgcaaaacacgggaaaagagcaggcgcgggcacagggagggcggaccacccaggaggagggaggg

SEQ ID NO: 257366 - RNA, 71 nt, Homo sapiens
gagcgcaggacgcagcagcggagaaaggggccgcagccggccaggggacccgaagggggcgagacgacaca

SEQ ID NO: 257367 - RNA, 73 nt, Homo sapiens
ccccgcaacgagaaccaagaccgagagcccaccgagaccgccagcgccacagcaaagaaaaccgaagagcgag

SEQ ID NO: 257368 - RNA, 75 nt, Homo sapiens
gaacacccacagagggagcgcaggggaagggacgcggacgcgcagcggaggggagccggcggccacacacccgag

SEQ ID NO: 257369 - RNA, 35 nt, Homo sapiens
gggcagggaccggaaggccgaacccgccccaagaa

SEQ ID NO: 257370 - RNA, 75 nt, Homo sapiens
acagcggacgagaagaggcaccaggccaggcacggggccacaccgggggagggcacaggagagccagaggaagaa

SEQ ID NO: 257371 - RNA, 68 nt, Homo sapiens
gccggaccggcggggcccgggcaagaaccggaagggccccaagcaggagcgcgggcaagagcggcgcc

SEQ ID NO: 257372 - RNA, 84 nt, Homo sapiens
cacacggaacaggacaggaacgggacaggaagagaggccccccaaagcaccgcgcaggggaagcggcgcagggaccggaagccg

SEQ ID NO: 257373 - RNA, 33 nt, Homo sapiens
cccgcaggccccccaggagacaggcaagcggag

SEQ ID NO: 257374 - RNA, 75 nt, Homo sapiens
ccccaggggaaaacccccgggaccagcagacgggcgagcgggcaccgcacgcccacgcggacggcgacggggcca

SEQ ID NO: 257375 - RNA, 85 nt, Homo sapiens
cgccggcccgagaaagcccgccagcagagacgccccacaaccgcccgggcgcggacggggcccggcgaaccccggcgcggcagag

SEQ ID NO: 257376 - RNA, 74 nt, Homo sapiens
gagaggacaagaccacgagccaggaggaagaacacccaaaggagggcggacgggccacgggccggcagagcgac

SEQ ID NO: 257377 - RNA, 78 nt, Homo sapiens
acacgggggcacgccacacggggacggcgaaggccaaaacagaagaggcaaagcccagccacagcagcagcccagcag

SEQ ID NO: 257378 - RNA, 73 nt, Homo sapiens
gggagcgaggcccgcggagcgccgccgcgcgacggaagggaccagccagagagaagcaacaaccagggcacac

SEQ ID NO: 257379 - RNA, 74 nt, Homo sapiens
ggcccggcccgacaccgcgggccgccagacgggaagggcgaacaagaggcgccagcgggcgcgccggaagaaca

SEQ ID NO: 257380 - RNA, 110 nt, Homo sapiens
gggagcagccaacaggccagcagcggcggaaacaccagacacaacacacaggccgccccacgccggcaccccgacccccgacgacgggaagccgggacaccagcaggcgg

SEQ ID NO: 257381 - RNA, 76 nt, Homo sapiens
acaaacgccaagggacggaccacgcccgcaccagggggacccaaaaggaaaaggacaggcagcagagagacaaggg

SEQ ID NO: 257382 - RNA, 69 nt, Homo sapiens
aaggaccggacaggaaaagcagagcagcgggcggagaaaagagccaaagcaacgggaccagcagcacaa

SEQ ID NO: 257383 - RNA, 62 nt, Homo sapiens
gcccgggcccgaggaggcagccaagccgagccgccacccggcgcccgaggaggagaaacaag

SEQ ID NO: 257384 - RNA, 72 nt, Homo sapiens
ccacgccaccgaagagccaagcccagagccaggacagagggcagcggcacaacccagagggcccagcgaccg

SEQ ID NO: 257385 - RNA, 76 nt, Homo sapiens
gaccaggaggcgagcaacagaggaagcacccgcgagaaagaagggcacagcgaaacagcccggccaaaagagcccg

SEQ ID NO: 257386 - RNA, 41 nt, Homo sapiens
caggacaccaaacaccgccgccgagcccacgcaggagacgg

SEQ ID NO: 257387 - RNA, 87 nt, Homo sapiens
aacagcgagccgcgggaagggagcacccagaaccagagaacagcagaggcccaggaaacagccaccaccccggcccccagagcccac

SEQ ID NO: 257388 - RNA, 78 nt, Homo sapiens
gagagagcgagcgagggggggcgcgccggaaaccggagcgcgcagcaggcaagaaagaggaaacagacgagggcaacc

SEQ ID NO: 257389 - RNA, 77 nt, Homo sapiens
ccaaacggaccaacccggagagggggggaagccccagaagcaaaccaggcagcggaagagcaaccacaaagaggaca

SEQ ID NO: 257390 - RNA, 79 nt, Homo sapiens
aggaccaagaaccagacgagggcagaggagaagcgcccaggcggagagaccggaggccggaacccagacccacagccgg

SEQ ID NO: 257391 - RNA, 80 nt, Homo sapiens
gccgcggagggaagacggacagcgaagccacccagcgccgaggagcggaaagaagcggagcgggccgcggagacgcaggg

SEQ ID NO: 257392 - RNA, 82 nt, Homo sapiens
agccgaggaagaagggggaaggaagaggaagaagagccaccagagagccaccagccaaggacagagggcaagagagacccag

SEQ ID NO: 257393 - RNA, 69 nt, Homo sapiens
gccacgggcggcccggcccccccacggcggaacacacacagcacacacgcaggaaggacggcagagaac

SEQ ID NO: 257394 - RNA, 81 nt, Homo sapiens
ccgccgccgccgcagccgccggagccgcaagccaaaggagaggcgccacaaaagaagggagaaaagccagccagcacgccc

SEQ ID NO: 257395 - RNA, 82 nt, Homo sapiens
caagaaccggccaccggccccacacgaccgacccacggcagggcaaccccaccgcggaaggcaggcacacagacgagaacag

SEQ ID NO: 257396 - RNA, 70 nt, Homo sapiens
ccggaaccaggaccgaacaaagaaacagagcgggccccccaccaggcaacgagggccaaccgccgcagca

SEQ ID NO: 257397 - RNA, 77 nt, Homo sapiens
gaccgcggagagaggcaccggccgaggcaaggagaaagaacaaaccccgaagacgacagcggccgaagccagagccg

SEQ ID NO: 257398 - RNA, 64 nt, Homo sapiens
caaaggcaccagcagacccagagaagagggaggggggaagacagggcccagcaccacaggacgg

SEQ ID NO: 257399 - RNA, 83 nt, Homo sapiens
gacagcacagcacacgacacccccgggaccgcggagagaagcagcggacagcagaggggcagacgagagaaacaccacaaacg

SEQ ID NO: 257400 - RNA, 69 nt, Homo sapiens
gacggagcgaggggcaggccggccagaccccagcgccccccgcccacggacggaccagacgaccccaga

SEQ ID NO: 257401 - RNA, 72 nt, Homo sapiens
gcccgacccaggacaggacccagcgcgggacagccagcgaggggcccggccgcggggcacagcagagggagc

SEQ ID NO: 257402 - RNA, 44 nt, Homo sapiens
cacggacccaggaggagccccgcccgccaaaagacccccagaag

SEQ ID NO: 257403 - RNA, 51 nt, Homo sapiens
gaaaggagaggaaagagagaaaaccgccgccggggccagcaagaacaaaaa

SEQ ID NO: 257404 - RNA, 75 nt, Homo sapiens
aaccaagagaaacaaccggcggagggggcagggcagaaggaccaggggcgacgaggcccagagcaagagaggcac

SEQ ID NO: 257405 - RNA, 69 nt, Homo sapiens
agagcagcccagaaggaaaagggggagagacaaccagagcggaaagggagaaaagcccccagaaaggag

SEQ ID NO: 257406 - RNA, 74 nt, Homo sapiens
cgcggcgccgccgccgccagcgcgccaccagcaagacccccagagggacgggcgacaggaaagaaaggggcaga

SEQ ID NO: 257407 - RNA, 56 nt, Homo sapiens
ggacagccaacggagcgaagcagagccaggcaccagacccggaggagcagcacccc

SEQ ID NO: 257408 - RNA, 104 nt, Homo sapiens
ggcccggaaaagaaaacagagcgacgagcaagaagcagcccaaagcgaagacagacgcaaggcgaacagcgcggagaacacaaggaagaaaagaaagcaagaca

SEQ ID NO: 257409 - RNA, 100 nt, Homo sapiens
gcggaagaccccaaagaagggagccgaagcgaggcggaaaacgaagacagcagaacagcacaccgagcaagaaacagaaggaaggacggaacaaggaaca

SEQ ID NO: 257410 - RNA, 34 nt, Homo sapiens
ccgagcaccagccgcaaggcgaacgcaagcagac

SEQ ID NO: 257411 - RNA, 63 nt, Homo sapiens
gggcaggcacgcaaaacggaacacagaagagaacagacagccccaccgggaaagagccaaggg

SEQ ID NO: 257412 - RNA, 90 nt, Homo sapiens
cgcccgccgggaaaccgcgggcgccgggcgaagcccgggcagggcgggaaggaaagcaaaagaggcggcaaggcagcccaggcaaagaag

SEQ ID NO: 257413 - RNA, 58 nt, Homo sapiens
ccaaaacgaaggaaagaacggggagccagaggcgaaccgccacgacgggaaaacgaag

SEQ ID NO: 257414 - RNA, 77 nt, Homo sapiens
cccgccgagcaggcgccgccccagcccgcgaacggccacaccaacaagacaagaaccaaacagaacccacgaaggga

SEQ ID NO: 257415 - RNA, 67 nt, Homo sapiens
cacgacccaacaccacagagaagccaacaaagaccagaaaaaaccaaggaccaaagaagccccgccc

SEQ ID NO: 257416 - RNA, 39 nt, Homo sapiens
ccacgagcagaccgggacaccgcggaggcagggcgccac

SEQ ID NO: 257417 - RNA, 79 nt, Homo sapiens
aaaaggaccagggaggacggagacaaggaagaacggagacagccaggaacgagagggaaggacaacagggacacagaaa

SEQ ID NO: 257418 - RNA, 78 nt, Homo sapiens
gccgccgccgccccagccgcccgcggccgggagcggagccccggggccgcagccaagccggaacaggagcggcgagcc

SEQ ID NO: 257419 - RNA, 78 nt, Homo sapiens
ggcggcggcggcggcggcggcgcagggggcggagccgccgaagcgcccgcgcggagggaaacacaaagaagacaccag

SEQ ID NO: 257420 - RNA, 78 nt, Homo sapiens
accgggaccagcagcagcaacggggacgacacaaccaacaacagaggacagcagcggacggccggaccaagaggcgcc

SEQ ID NO: 257421 - RNA, 83 nt, Homo sapiens
agcgaagaaagggcggcgaggagggcgccgcggacagccagccaccagcagaaggccccggagcccaagccaggaccggaaaa

SEQ ID NO: 257422 - RNA, 72 nt, Homo sapiens
gccccgccagagccagcgggagaggagacaacaacacggcggcagagacccgggagcggaggagcgccgcac

SEQ ID NO: 257423 - RNA, 84 nt, Homo sapiens
gcgaccgcccgcgccggcaccggggcggccggccaaagccaggggccgcaaggccaggcgcgcagaggcacccaacggcacaga

SEQ ID NO: 257424 - RNA, 86 nt, Homo sapiens
caagcggaagcgccccaccgcgggcgccaaggggagcagaaggaccggacacagcacaggaagaaacgccaggaacacaagaaaag

SEQ ID NO: 257425 - RNA, 72 nt, Homo sapiens
cagagagccacagacggagcggagaaccgacacaacccaggggagccgccaccaaaagcagacggaaaaccc

SEQ ID NO: 257426 - RNA, 68 nt, Homo sapiens
gaccaagaaccaggacgaaagaggagagaacgaccccagggcaggaacaagagagccccagcccgcag

SEQ ID NO: 257427 - RNA, 126 nt, Homo sapiens
cagggaagcgagcaaggggcggaaggccgaagccaggggcggggaccacggccgggacaccagggcagaagacgaccccgacgcaggccaggagccgcggacagaagccgagcacggccgagacaa

SEQ ID NO: 257428 - RNA, 81 nt, Homo sapiens
ccaaaagcaggaaaacggggaaccagaaccaagggaaggacagcaaaaggagaaccagggagaggaggagaaacccacaaa

SEQ ID NO: 257429 - RNA, 106 nt, Homo sapiens
aaaggcgcgagagcacgcaccgaagcaaaaccaacgcaaccaccccagccaaacggcaagacgcagcaagaacgggacaacggcagggcggcacccaacaaaacgc

SEQ ID NO: 257430 - RNA, 78 nt, Homo sapiens
gggccgaaagcagaagaaaagggacgcaagaaacccaggacgagaacagcaacagaggaggcccgaaacccaagcccc

SEQ ID NO: 257431 - RNA, 89 nt, Homo sapiens
cccggggcgggccgggcgggccgcgggagccgcacgcggcgaaggaagaggagggcaagaagggcaagaagacgcggcgcgcaacgcaa

SEQ ID NO: 257432 - RNA, 73 nt, Homo sapiens
gacccgcgccagcgcgacgacggaagaaccccgaagggaagaaagaagaggcccgaaccaacgccacgaaggc

SEQ ID NO: 257433 - RNA, 63 nt, Homo sapiens
gaagaccagcaggaaagcaggagcccacagggaccagcagcgcaaaaacaggcagggaaaacc

SEQ ID NO: 257434 - RNA, 73 nt, Homo sapiens
cgaagaaaccacacgacacggaagggccccacaccaaaccgccacgcaacagacgcagagccagccaggagcc

SEQ ID NO: 257435 - RNA, 68 nt, Homo sapiens
cggccaagcccgccgcgcccgacaacggcaagcggagaagagcaaggccgaaccgagaggaagggcaa

SEQ ID NO: 257436 - RNA, 82 nt, Homo sapiens
ccggggcaggaggcggggagccagggaagagcggaaagagagaacaccggaagagcaggggccccacaggacagaggcgggg

SEQ ID NO: 257437 - RNA, 31 nt, Homo sapiens
acgaccgcccaacacggcaaccaccgaaacg

SEQ ID NO: 257438 - RNA, 68 nt, Homo sapiens
ccaggccgaaggcaaaggcggcggcagcagcagcggcagagaaagaagcgggggacgaagggaacccg

SEQ ID NO: 257439 - RNA, 81 nt, Homo sapiens
cgcccgcacgagcagcggagaaggacaagggcgcggagcgacgggggcgccgccgagaccaggacgagccaaccccacgcg

SEQ ID NO: 257440 - RNA, 80 nt, Homo sapiens
gccgcgcagccaggaagcagagccagacaccgccaggagacgaggaaaggaagaggggaaaccagaacgcaaaacacgac

SEQ ID NO: 257441 - RNA, 79 nt, Homo sapiens
ggcagggggccacacgcaaggggaacaggcgggcgcaaagacaccgccagaagaccagaggaccccggaggaagcagcc

SEQ ID NO: 257442 - RNA, 81 nt, Homo sapiens
acggcgggacaggaagccacagcaagagcaacgaaccaaagcaaaggaggccgggggaagacggaaaagagagacggggcc

SEQ ID NO: 257443 - RNA, 77 nt, Homo sapiens
agggagacccaggaacggcagaagaccagggccacggccacccagcggagaaggggcaaacacagcgcgcaacccaa

SEQ ID NO: 257444 - RNA, 54 nt, Homo sapiens
ggacagaggaccaaagcggaccagagacagaggcaagcaaaacagacaaacaag

SEQ ID NO: 257445 - RNA, 80 nt, Homo sapiens
ccaggagcgcgacaagccacgccacaacagcgccacaccaccaagacggacagaaggcaagcagcaaggaacaaggaaag

SEQ ID NO: 257446 - RNA, 78 nt, Homo sapiens
agggcacgccagcaccgcgacacaaaccaacccagggccagaaagagaacaggcacaacaaaagcagaacccgggaac

SEQ ID NO: 257447 - RNA, 71 nt, Homo sapiens
aaacccaagccccgaggaaggcggacagcaaaaggagaaaaaccgcacaaaggcccaacagaaagacaaga

SEQ ID NO: 257448 - RNA, 62 nt, Homo sapiens
aagacaccgggaccccggaagccaaaaagccggaacgcgcgccacccggcagaaacgcaccc

SEQ ID NO: 257449 - RNA, 77 nt, Homo sapiens
gaaaggacaagcaagaaagcaaagaagaaacaccccgccgccagggacaagccagccgcccacagccggccggcaca

SEQ ID NO: 257450 - RNA, 76 nt, Homo sapiens
acgggaagggaagagacggaagaccacggggagaagagaaacggaccagaaccagaggaggcgcggaggaggagga

SEQ ID NO: 257451 - RNA, 75 nt, Homo sapiens
gcacgccccccagacaaccggaagggaccgacacgagcggcaaggagacagcaacgagaaaaaaacgagaaccgc

SEQ ID NO: 257452 - RNA, 37 nt, Homo sapiens
cggacagagagacacaggcggaaaggaaaaacaacgg

SEQ ID NO: 257453 - RNA, 86 nt, Homo sapiens
acgcaggcaacagcaagaacaggacacacccgacacccaaccccgaaccccacacaccgccagcacacaggaggagagcggaccga

SEQ ID NO: 257454 - RNA, 83 nt, Homo sapiens
gagaaggaccaagaaccagaccacaggcggagcagcagcagccggagccaggaccgcggaggggcaggacgggcaggcccaga

SEQ ID NO: 257455 - RNA, 73 nt, Homo sapiens
ccgccagcgccgcaagcagcaagagaggaccggaagaagaggggagaggagagccagcagcccccccaggaca

SEQ ID NO: 257456 - RNA, 76 nt, Homo sapiens
ccccaggagaaacgaggagcgcggccaccccccggagcaaagacggacaacacccagcagacagaggagcagggag

SEQ ID NO: 257457 - RNA, 69 nt, Homo sapiens
aacgaagacaacggcaggcccaaaggacacagaagccggccggccccgaggaagccaagacccgccccg

SEQ ID NO: 257458 - RNA, 69 nt, Homo sapiens
gcccccgggcacacgagcacgagaaacccggacgcacacgggagcgccccccagcagccggggggagca

SEQ ID NO: 257459 - RNA, 77 nt, Homo sapiens
aaagggagcaccgacacgaggaacagcaggccaagagacggagcagcagagcacccagaagcacgaaggacacagca

SEQ ID NO: 257460 - RNA, 79 nt, Homo sapiens
aagcaaggcgacgccagaggaggaaaggaagacaaggggagagcccagggacgcggagggagcccagcggggagcccca

SEQ ID NO: 257461 - RNA, 67 nt, Homo sapiens
ccgagcccaggagcgccacgcgcggaaggcagcgcccagcagcgcagaggacccaagaagaccagcc

SEQ ID NO: 257462 - RNA, 53 nt, Homo sapiens
cgccccacaccgagcacccgcagaacaggagagggcccaacaggagcacaaga

SEQ ID NO: 257463 - RNA, 69 nt, Homo sapiens
cgcacaaacaagcaaggcagccagcgcagcccacgaggaacgaaaagaaggaaacacaagaaggcgacc

SEQ ID NO: 257464 - RNA, 101 nt, Homo sapiens
aagcccgacacaggagcgggcagaggagcagggaggccacaggggccgaaacacagagcaaggacagcccaaggcggaaaagcgaaggaagccacaagcac

SEQ ID NO: 257465 - RNA, 77 nt, Homo sapiens
ggcgcggaccgggcccggcgggaagcaggccggcccggccacccccgggcccgcgccccaggcgagagccccgcaac

SEQ ID NO: 257466 - RNA, 103 nt, Homo sapiens
aaggagaagagcagccagcaagcggaggacagcaggcagaagaccccaagccgcccgacacacaaacaaaaaaggacccccccgcaagccaaaagccacagac

SEQ ID NO: 257467 - RNA, 86 nt, Homo sapiens
ccgggaccgcgcggacccggccgggagaagcagcagcgcaagagccaggacaaaaccaggcagaaccaacacgaacccaagcacaa

SEQ ID NO: 257468 - RNA, 66 nt, Homo sapiens
aaggaccaaaagagaagcaccaaggaccagccacccggaggaaagcccagagggaagcgcaagaag

SEQ ID NO: 257469 - RNA, 75 nt, Homo sapiens
gaacaaaccgaagaacagcgggaaagaaggcaaaacacgggcagcacaagcacacaagccacaaagcagaaagac

SEQ ID NO: 257470 - RNA, 71 nt, Homo sapiens
gaggagcccgcaagaggccagcgaaaaccgaagaaaaacacggccagaggaaggaggggcaacccagcacg

SEQ ID NO: 257471 - RNA, 61 nt, Homo sapiens
acaggagcaaagccaacgcccaggggagaaaacaagggaaaagccgggccacagaagcacc

SEQ ID NO: 257472 - RNA, 77 nt, Homo sapiens
gagaggcgcgggcgggagccacacccccaacgagcgagacgacggacaaaagacccacaccgaaggacgagaaacag

SEQ ID NO: 257473 - RNA, 75 nt, Homo sapiens
cccggagcccggcgcccccgcaagaggacggcgccggcagccggacgacaggcagcgcgggagcaccggaagagc

SEQ ID NO: 257474 - RNA, 43 nt, Homo sapiens
ccgcggcccggcagggggaacgggaggggggcccaaagcccag

SEQ ID NO: 257475 - RNA, 52 nt, Homo sapiens
gaaacagcagaaacgcaccaggccaaagaaagagaacaagaagacggggccc

SEQ ID NO: 257476 - RNA, 78 nt, Homo sapiens
ccggcaacagggcggcggggaaaagacaacccagaaaagaaaaggccaggggcgccgaaaaacccgggaacaaacagg

SEQ ID NO: 257477 - RNA, 65 nt, Homo sapiens
agaaccgggccgacgccagggaaccccagaaacgaagagaagcaaaagaacaaacagccccccag

SEQ ID NO: 257478 - RNA, 78 nt, Homo sapiens
ccgccaccgccgccgaagggccgagccccaacccccaggaccgggcagacggcggggcaaggaagacccaaaaggcag

SEQ ID NO: 257479 - RNA, 76 nt, Homo sapiens
caaccccagcccagccccaaagcggggacagcagcagaaggcgacaggaggagcgggcggaaacaagccacccacc

SEQ ID NO: 257480 - RNA, 80 nt, Homo sapiens
ggacgagccacaggagcccagcaaccggcaacaggagcagagacacgaaaagaaagcacagcaacacaggaacagaaagg

SEQ ID NO: 257481 - RNA, 77 nt, Homo sapiens
gacggcgcacgccgcaagggcggggcggcaccaagcgggccagagcgagcaccagggggggggagcgaccgcagggc

SEQ ID NO: 257482 - RNA, 75 nt, Homo sapiens
gccgcgccgccccccggagacgaagacagggggaggagagacaagaagaagggaccgagccacccaccaaagccg

SEQ ID NO: 257483 - RNA, 70 nt, Homo sapiens
aagagagaaaccaacaagcggggcggagaacggaaaagcaccaggaagcagagaggaccgcagaagggaa

SEQ ID NO: 257484 - RNA, 74 nt, Homo sapiens
gagggggggcgcgccggaaaccggagcgcgcagcagacaacccagaaaagaaaaggccaggggcgccgaaaaac

SEQ ID NO: 257485 - RNA, 71 nt, Homo sapiens
agagccagagacaaccgcacaaaggaccacgccgcgaggcaaacgcaagggaaaaaagggcaggggaaaga

SEQ ID NO: 257486 - RNA, 76 nt, Homo sapiens
gccagaaaccgcgggagaaacccaggaagcccagggcccacaacggcaggccacagcgggaaaggggagcccgaag

SEQ ID NO: 257487 - RNA, 69 nt, Homo sapiens
cggggaaagccaaagccgaccaggaagaggggcccccaaagggaagccaaacacaaaggaagaagcccg

SEQ ID NO: 257488 - RNA, 77 nt, Homo sapiens
ggaggagacggggcagacaacggagcccgggggacgcggccggcgccagcccccgacccgaagaagagcgcaccggg

SEQ ID NO: 257489 - RNA, 83 nt, Homo sapiens
gccgccgccgccgccagaacaaccgggcgccgacgagacggggacaccggaaacggaccaaggagaggagagggggaagcagg

SEQ ID NO: 257490 - RNA, 79 nt, Homo sapiens
gagaggagccaaacccccaggccaaacacacaggaacgccagaccccagccgagggaggcaacagcaaagggacagcca

SEQ ID NO: 257491 - RNA, 80 nt, Homo sapiens
aaccaagacaacccaacaaacaaccggagggagggaagaagccaagaggagaaagaagcgacacccacacgaaggcccac

SEQ ID NO: 257492 - RNA, 78 nt, Homo sapiens
aagcaccagaaaacaggcggaagaagcgagacagagggccaaggcaacacccgacggaaagaccacagcaagaccacg

SEQ ID NO: 257493 - RNA, 68 nt, Homo sapiens
gcgaacagcaaggcacaagcagccccccggccagccacaaagcgggaccacaggaacacgcgcgggac

SEQ ID NO: 257494 - RNA, 81 nt, Homo sapiens
aagcgagacaggggagggccggccagcacccagcaggacccaggaggcagcccagcaccaccaaaggggggagcacacgcc

SEQ ID NO: 257495 - RNA, 81 nt, Homo sapiens
caccagagcaaagccaccccccgaggaaaaagcaccgagaagacgccaaagcgccgccaccgcaacaccgcccagcgccag

SEQ ID NO: 257496 - RNA, 45 nt, Homo sapiens
agggacaagggccacacccccaggagcacaggcggaggcagcgga

SEQ ID NO: 257497 - RNA, 95 nt, Homo sapiens
cagccgaccgagcccaggagcgccacgcgcggaaggcagcgcccagcagcgcagggagcggcgacagacacgggaagcaagagaacggcgcagcg

SEQ ID NO: 257498 - RNA, 74 nt, Homo sapiens
cgcccccggcccgcagcccccgccggccgcccaacaccgaacaccgcacgagaagagaagcccagagcaaaaca

SEQ ID NO: 257499 - RNA, 74 nt, Homo sapiens
aaacagaagccagaacgcggacccccgcaggcaagaacgccccggcaaggacggaggcaggcaccaccaacagc

SEQ ID NO: 257500 - RNA, 100 nt, Homo sapiens
cgacgccaacacccccgggccccaccggccaagcgcaagccaggcagcgccaaggaccgggacagacaaacccaaaagaccccgcaacaacacagaaccc

SEQ ID NO: 257501 - RNA, 70 nt, Homo sapiens
aagcgggccacccacaaagaaccccagaacagacagaggggacagcaaaaccacgacgcaggcaaggagc

SEQ ID NO: 257502 - RNA, 80 nt, Homo sapiens
caagcacccccgaggcaaagaccacgccgagaggacgggggaggggcaggccggacaagcacacacaaaccacaagaagg

SEQ ID NO: 257503 - RNA, 37 nt, Homo sapiens
cggaaaagcagcaaccgacaacaggcacaaagagaga

SEQ ID NO: 257504 - RNA, 73 nt, Homo sapiens
gaccaggccacgagcccggcgcaagcaggcgcgacgaggaaacagacacaggaacaggcacaggggggggaac

SEQ ID NO: 257505 - RNA, 73 nt, Homo sapiens
cacccacacggcagcaggacacagacaagggccaggacggaagacgccagcgcgccaagaaggacgcacgaac

SEQ ID NO: 257506 - RNA, 75 nt, Homo sapiens
ggcgaaagccgaccacccggcgaaggaacggaaacgccaggaagaaacccaagggaacggagaaccgcacagaac

SEQ ID NO: 257507 - RNA, 79 nt, Homo sapiens
gaacgaagaggccgccgccgggcccaggcccgcgaccgccgccagcgcccgaggagccaaaaaccgaacacccggaagg

SEQ ID NO: 257508 - RNA, 72 nt, Homo sapiens
cgccgccgccgccacggcgcccacccaacgcgaagacggaacccgggacgacggagccaggcagcgagcggg

SEQ ID NO: 257509 - RNA, 96 nt, Homo sapiens
aagacggcaaagcacccagccgcagcgccagcagcggacaggcacagacaaccagggcggaagaagagcccggaaggggcgccaggcacgagacag

SEQ ID NO: 257510 - RNA, 55 nt, Homo sapiens
agcccccaggggagccggcggaagccggggggggcacagagccccggaagacagc

SEQ ID NO: 257511 - RNA, 69 nt, Homo sapiens
acggaccagggggacggcgacagcgccgaacagcaaccggccaggaccagccggcggccgcaggggaca

SEQ ID NO: 257512 - RNA, 85 nt, Homo sapiens
gcccaacacgagaagaggaggcggggagaccagggaacaggcacgccccacccgccagccgagcccccgacgcagcacaaagccc

SEQ ID NO: 257513 - RNA, 75 nt, Homo sapiens
ggcggcgggcaccgcagcgccggaagaggcgcaccagccgggaccaaagaagccaaacccacaaaccgaagcagc

SEQ ID NO: 257514 - RNA, 68 nt, Homo sapiens
gacgagaagccccccgagacacaagacacccaagaagcccagcagacccaacgcccagcaccaaaagg

SEQ ID NO: 257515 - RNA, 76 nt, Homo sapiens
gaggggaagaaaagaaggggcagagaaagcagggaaaggagagcaccacacaagcccgggagaggcaaaccacccc

SEQ ID NO: 257516 - RNA, 85 nt, Homo sapiens
agccggccgacgcgggcgcgagggcagaaccggacaccccgaagggagacaaggcaccccaggagccaaggagggagggggaccg

SEQ ID NO: 257517 - RNA, 73 nt, Homo sapiens
gacaagaagggcaaagccgaaggggaaaaacagaccaagccaagagaaagaagagagaaaccacagcaacaag

SEQ ID NO: 257518 - RNA, 39 nt, Homo sapiens
cgggacggccgagacagagcaccgggccggcggcgagcc

SEQ ID NO: 257519 - RNA, 51 nt, Homo sapiens
acgaagcccacgccgggacccagcgcagggcagcagaaaggcagcgggccg

SEQ ID NO: 257520 - RNA, 77 nt, Homo sapiens
cggcccgccaggggcggaggaagaccccaacaggcccgaccaacaaagaaacccaacagacggaaaccaccaaccag

SEQ ID NO: 257521 - RNA, 84 nt, Homo sapiens
aaacggaagcgcagggagaaggaagaggggaaaaggaagagcaacgcaaggaaaaagaaaagacaaagagagcaggagccgcag

SEQ ID NO: 257522 - RNA, 86 nt, Homo sapiens
cagccgcaggagccccggaggcccaggacacaggcggcggcagcagcgaaagagaagaaccagcagaaagcaaaacagagcggagg

SEQ ID NO: 257523 - RNA, 100 nt, Homo sapiens
ccaccaccacgagcgggagcgaagagggaaccagcgcgcggcagccgcgacggaaacaggaacacgaaagaggaaaaacgcacaagaaaccgaagccaag

SEQ ID NO: 257524 - RNA, 78 nt, Homo sapiens
ccagcgaggccaaggccaggcaaacaagccaagagcagaagaaggagcgcggcagaggagcccccccgccccgcgcag

SEQ ID NO: 257525 - RNA, 72 nt, Homo sapiens
aaaaacaaagcgcgcagaaagggcgaccaccaaaaaaacggacaaaagagcagggaaccccagaggagccac

SEQ ID NO: 257526 - RNA, 76 nt, Homo sapiens
gggaggacacccggacgcgcgcgaggggcgacggggagaaggaaacccaaccggaggaccgagcgaaaaaaaacga

SEQ ID NO: 257527 - RNA, 75 nt, Homo sapiens
agcgggggcaaccccaaggccccaggagagagagcggagacaaggccacagcaggccacggcgggggcagccagc

SEQ ID NO: 257528 - RNA, 82 nt, Homo sapiens
gagcggggggaaagacaccagggcccgcagggggagacaaaacggaagcagggaaaaggagggccaggcaggagacgaggaa

SEQ ID NO: 257529 - RNA, 79 nt, Homo sapiens
cccagcgcagaaggcgcgccgccggacgccccaggaccacaacaagggccggaccacccagggaccgagcaccgcagac

SEQ ID NO: 257530 - RNA, 74 nt, Homo sapiens
cagcgggggaaccggcgcgccggcgcgcggcgcggacaggcccaaacgaggcgagggcgccggcaccagggcgc

SEQ ID NO: 257531 - RNA, 68 nt, Homo sapiens
gaccagaagacagaccgcaccccaaaaggcacaaaggaacagcagagaacaaaggaccgcaaacgaag

SEQ ID NO: 257532 - RNA, 72 nt, Homo sapiens
cagcacaggcggaccagcgaggaaaacgagacacacaagcggcaggacagaagcaccaccaccgagaaacca

SEQ ID NO: 257533 - RNA, 72 nt, Homo sapiens
cgccccccagcccgagcgcgcccgagggcgagaagaaccccgacgccacaccgcggggggcacgcggcgggc

SEQ ID NO: 257534 - RNA, 77 nt, Homo sapiens
cacggcgggcacggacccaggacccccgcgggcgacgcgagcccagagacaccaggcgccgagaaggccagcagaga

SEQ ID NO: 257535 - RNA, 66 nt, Homo sapiens
gagaaccccaaccggggaggaaaaccgacgaagggcccgggacgagcggcccagcgacgagcgaag

SEQ ID NO: 257536 - RNA, 71 nt, Homo sapiens
ggggcagaccaaacggcaaggccaaggaagcacgggaagaacagaaaagagaagcaccacggaaaccaccg

SEQ ID NO: 257537 - RNA, 78 nt, Homo sapiens
acccacggggaccagcagccgggccagggccagagcaaagaggccaagccaaaggcgcggacggggcaaaagagcgga

SEQ ID NO: 257538 - RNA, 74 nt, Homo sapiens
gaaaacgaagaggagaagacaccaaaaagcaaacggaccagaccgaccaccaaaaaaggggagaagagccacca

SEQ ID NO: 257539 - RNA, 63 nt, Homo sapiens
ggccgggacaccacacgacgggaaccccgcacacgagggcccaaaacacggagccccaagcgc

SEQ ID NO: 257540 - RNA, 81 nt, Homo sapiens
agaaaaagaaagcgcgaaaacacgaaccagagcagccccaaacgcagaagggcgagaacagcacccgcagcggagaaacac

SEQ ID NO: 257541 - RNA, 90 nt, Homo sapiens
ggaggcaaagacgacaccgggcgccgaggcgccacaaaagggaccaaaagaacccagccaacccgcagagggaggggaggggcgagcgga

SEQ ID NO: 257542 - RNA, 40 nt, Homo sapiens
aagaggcgagaaagaagacaggcggccaaaaggcaacagg

SEQ ID NO: 257543 - RNA, 75 nt, Homo sapiens
gaacagggaagggcgcgagcggggacaaagcaggcaaacggagaggcaagaccagcagagggagccaccaccgag

SEQ ID NO: 257544 - RNA, 58 nt, Homo sapiens
cccacggagccaaccagaccaaggcagaagggagagaacagcacacagaggcgcaagg

SEQ ID NO: 257545 - RNA, 74 nt, Homo sapiens
cggggcccccgacagccaccgcccacggacagagccggcggggagccagccgaggcaggcgcccaggcaagagc

SEQ ID NO: 257546 - RNA, 74 nt, Homo sapiens
cgccgccaagcaggcagaaccaggacagggcagaccgccagcagcacagcaagccacagagagggccggcaggg

SEQ ID NO: 257547 - RNA, 74 nt, Homo sapiens
caaggcaacagaaagagcaacagcagggcaacaggggacccacagcccggcgaccacggggaaccgaggcagaa

SEQ ID NO: 257548 - RNA, 75 nt, Homo sapiens
gcccggaaagcccgccacagcggcccggccccccggacagacgccgacgcccagggccagaggacaccagagacc

SEQ ID NO: 257549 - RNA, 72 nt, Homo sapiens
gacaaaagggccaaagaagggagaggaaaagaaagaacccgaaagacaaaagagaaggagaagggcagagaa

SEQ ID NO: 257550 - RNA, 86 nt, Homo sapiens
accgaggcgaaggggccaaccagggaaaggagagggagggaccagggccacagcggagaaggcccgggcaggccaagggcccagag

SEQ ID NO: 257551 - RNA, 80 nt, Homo sapiens
gcccggggacgggcgcaagagaagggcaccccacggccgccagggccaggcagagcagcccaccagggaggggagggggg

SEQ ID NO: 257552 - RNA, 83 nt, Homo sapiens
gcgaggaagaagaggacgacgacgacgaggaagaggaggcgaggacccacgaggaagcggccgcggcgaaccccagagccagc

SEQ ID NO: 257553 - RNA, 58 nt, Homo sapiens
acagccggggaggcccgacagcccaggacacccccagagaagcaagggaccgcaagcg

SEQ ID NO: 257554 - RNA, 115 nt, Homo sapiens
accaggcacccgggcccagccgggaacccccacgcggccagcgaaaacgcccagcagcacgaccccagccagacaggcgagacgaagaacagaagaagaacagagaggggaagac

SEQ ID NO: 257555 - RNA, 71 nt, Homo sapiens
gggaaggcagacagcgagggcgacgaacaacggcaagcggagaagagcaaggccgaaccgagaggaagggc

SEQ ID NO: 257556 - RNA, 68 nt, Homo sapiens
gccgccccgccgcagacgccgccgcccgagccacacgccagacaccaggggaagggaaggcggagcaa

SEQ ID NO: 257557 - RNA, 73 nt, Homo sapiens
ggcgcccgagcggcagaccgaccaccccccaggacgaggaagacaaggccagccacggaaggagacacccgaa

SEQ ID NO: 257558 - RNA, 84 nt, Homo sapiens
agcggcggggcggcagcaagaggacaggcccgccagacggaaaaagaaagcagaagccgagcccgagccggagacggagcacca

SEQ ID NO: 257559 - RNA, 75 nt, Homo sapiens
cacaaacagcagaggggcgcagagcaagccgacgagaagcaagaacaccgcagaaagccgcaacaccgagaaaaa

SEQ ID NO: 257560 - RNA, 68 nt, Homo sapiens
caaagaaaggcgcaggaaaaagccgagagcccgcccacagagagaagggagggccacggaacccggcg

SEQ ID NO: 257561 - RNA, 70 nt, Homo sapiens
ccacaacacgggaaacacaacaccgagcgaagaaaagagggacagaagagggcggacgaggaagagggca

SEQ ID NO: 257562 - RNA, 72 nt, Homo sapiens
caaggcgccacggcagcgaagcaaaacggacaagcggaagggcaacaacacaccagagaagcagccggaaac

SEQ ID NO: 257563 - RNA, 77 nt, Homo sapiens
gcagcccaagagcgggcccgggggccccggaccaggaaaccccacgcccgagccaaagaaggacagagggaaaaccg

SEQ ID NO: 257564 - RNA, 75 nt, Homo sapiens
cagcagcaaaacccagggaccaggcggacggagaacagaagcccaggagcagacaaaagaggacggggccaccca

SEQ ID NO: 257565 - RNA, 76 nt, Homo sapiens
ggccagagaaggacacccccgaacaaaaggagaaaaggagcagcaacagccaagagccggccagccggggagacaa

SEQ ID NO: 257566 - RNA, 82 nt, Homo sapiens
ccagaccaaaacacaccgagccccaggcaccgagaccaaaccgagacggagcccgcgaccaggaaccgacccagccaaacgg

SEQ ID NO: 257567 - RNA, 76 nt, Homo sapiens
ccagcagacgagggggagacggcagcccgagcaccaccggggcaccagggaaacggggcggaccagaccaccgggc

SEQ ID NO: 257568 - RNA, 80 nt, Homo sapiens
aggacaaaagagacacaaccaaaggacaccagagcccgaagcagcgagccagaacaggacaccgggaaacaagaaggacc

SEQ ID NO: 257569 - RNA, 73 nt, Homo sapiens
aaccaacggcccgggaccaccggcgacagcagaaaggggacccgaacccccgggccggaggacccagccggcc

SEQ ID NO: 257570 - RNA, 80 nt, Homo sapiens
gaaaccggcgacgccggagcgggaacaagccagccagcaccacccaacaccagccagaccggcagcaaccagcgacgaag

SEQ ID NO: 257571 - RNA, 77 nt, Homo sapiens
cggcgggccccggcgaggcagcgcggccgcagcagcccggagaaagaagagagaccagaaacgagaggagaagaaac

SEQ ID NO: 257572 - RNA, 73 nt, Homo sapiens
ccccggagaaaaggccaagaaggcagagaaagggcgcaaaaagaaagaaaacaaaagccagccaaaaacagac

SEQ ID NO: 257573 - RNA, 87 nt, Homo sapiens
aacccagcaaaagcgggaagaacaaaggaaggggagcccgggacccccgggggcgcaggcagccggcaccccgccaaccggcagcag

SEQ ID NO: 257574 - RNA, 59 nt, Homo sapiens
ccagaccaaggcagggaggcgggaggcccccgaaaggcaaggcgcccccccggaccaca

SEQ ID NO: 257575 - RNA, 70 nt, Homo sapiens
gacagggagagacgggcacagggaagcgccggaaaaaccaaagaggaaaggcaagggcagaaaagagggg

SEQ ID NO: 257576 - RNA, 56 nt, Homo sapiens
aaaggcgagggaagcgccggggggaaaggacaccaagcagggggcggcagcaaaag

SEQ ID NO: 257577 - RNA, 77 nt, Homo sapiens
cgggagcagccggcgccggcgcacggcccgagcgggggcagccgcagaggcgcgggagaaaagcccagaaccgagac

SEQ ID NO: 257578 - RNA, 74 nt, Homo sapiens
ccacaggccccggcccagagcccaacggaggagcaacccccgggagggggaaccaccagacgaaaaaagaacaa

SEQ ID NO: 257579 - RNA, 84 nt, Homo sapiens
acaaggacgggaagcaccaaagcgcgccaagaggagcgaacaggagcggccccccccacgagagaggcagcaaacacaccagac

SEQ ID NO: 257580 - RNA, 78 nt, Homo sapiens
ccgaaccagggagcgcaccgaaccggacccagaaggcgcgaaggcagaccgcccagcggcggccgccccacccggcgc

SEQ ID NO: 257581 - RNA, 73 nt, Homo sapiens
aaagggagcaccagccagaccgggaagaaacgaaggggggaggcccaggccaaaagaaacccagaaacagcac

SEQ ID NO: 257582 - RNA, 84 nt, Homo sapiens
gacccacagaggagggaagcaggaaagcaagaagaacacacccagcagcgcgagacaaacgggggagaggaccgcgagacgcag

SEQ ID NO: 257583 - RNA, 90 nt, Homo sapiens
cggccgcgcccgggacgccgccgaccgcccggcaggaaccgggaccgccagcgcaggagcccaggaccgacagcagaggagcgcaagaac

SEQ ID NO: 257584 - RNA, 78 nt, Homo sapiens
accagggaaagcagcacagcaaagaggagaaggcagagcccccccaggcagaagcccgagcgggaaccagcgaagcca

SEQ ID NO: 257585 - RNA, 80 nt, Homo sapiens
agccgaacaggcagggccagacccaggcagggacagcagggacagccgggagagcaggagagacccgcgagggaagccgg

SEQ ID NO: 257586 - RNA, 73 nt, Homo sapiens
cccaggggcccggacggacgcccgccaccacccgccacccccagacccccagcccaggcccagccccaagcag

SEQ ID NO: 257587 - RNA, 80 nt, Homo sapiens
gggcggggaggaggacgcggggaagggcgccacgggacagccaacaccagaccgagcccacgcgcgccacagggagggga

SEQ ID NO: 257588 - RNA, 72 nt, Homo sapiens
gccgcggcgaggacaacggcgcgccgccagaagggggcggaccggccaaacagccaaagccacccgggaggc

SEQ ID NO: 257589 - RNA, 85 nt, Homo sapiens
aggacgggggcagcaacaacgagccggaacaggagggacggcaccagcgggaagcaacagccacggggccaagcgggagcagagg

SEQ ID NO: 257590 - RNA, 79 nt, Homo sapiens
caggcccagagcgcgcgagcggaccaggagggcacccccgggacggacaaaaccgaccacaggcccgcaggagagagaa

SEQ ID NO: 257591 - RNA, 75 nt, Homo sapiens
aacaaacaaacacccagaaacaagagcacggggcgcagaagagcccgggaaccaaacgccccgccccaaagcaga

SEQ ID NO: 257592 - RNA, 85 nt, Homo sapiens
agggccagcggaaccagaagcagcccagggccccgagaaggagccgcccaagccagagacacagaaccccaaagaagccaacaag

SEQ ID NO: 257593 - RNA, 77 nt, Homo sapiens
cagacccagggggagacggcggccagcacaggaacagcccaaccacaggaaaacaagagcaggcagaaaccagggaa

SEQ ID NO: 257594 - RNA, 55 nt, Homo sapiens
aggagccccccgcccagacaaggaacaagcggagcagccagccaaaacccaacag

SEQ ID NO: 257595 - RNA, 80 nt, Homo sapiens
ggagcccacaacaaccacagcccaacagcaggggggaacaccccgagcccaaggcagggaaggagccggccgcagacggc

SEQ ID NO: 257596 - RNA, 74 nt, Homo sapiens
gagggacgcacccccacagggcagaagaaggaccaaaccaccacggagcagagaaaggaagcaagcgggacccg

SEQ ID NO: 257597 - RNA, 74 nt, Homo sapiens
gaagccggaccgcccaaggagcagcggaacaggcccccagccccccggccacccaaacgggcccacagcacgca

SEQ ID NO: 257598 - RNA, 77 nt, Homo sapiens
ccagcacgacccgagagcacagggggcacccgaggaggaagagggcagggcccacggaaagaagggaaacccgggga

SEQ ID NO: 257599 - RNA, 56 nt, Homo sapiens
caggaagcggaaaacagaaccacagacacccccgagggccccaaggcggcagcccc

SEQ ID NO: 257600 - RNA, 86 nt, Homo sapiens
gcgggaagaggcggcgccgccacccccccccagcagagaggggagaagagcgagacgagaaagaagaggaagaagagagagaagag

SEQ ID NO: 257601 - RNA, 78 nt, Homo sapiens
cggagccacggggaagggacccgaaggggaccccagcccccccagccgaaacagagaaaaggaggaggacggcacaaa

SEQ ID NO: 257602 - RNA, 34 nt, Homo sapiens
ccccagccaccaagagaagcaccgaggagcaaca

SEQ ID NO: 257603 - RNA, 73 nt, Homo sapiens
cgccaagcagcagaaagaggacagaaggaaaaagccaacgccagcgggagaaagaacgcaacaaaagggacag

SEQ ID NO: 257604 - RNA, 73 nt, Homo sapiens
ggaacaaccacggaacccggggggagaagggaggagagaccgggagaaaccgaacgaacaggcgggcccagcc

SEQ ID NO: 257605 - RNA, 73 nt, Homo sapiens
caagagggccagcgaaggccaaaaggaaggcaggaagaacaaaggaagaagaacgaagaaagagaacacggag

SEQ ID NO: 257606 - RNA, 76 nt, Homo sapiens
gacgaggcgcgggcgcgcacccgagccgcaaggaggcgggcaaggagacaggaaggcacgcccgggcaacgaagcc

SEQ ID NO: 257607 - RNA, 99 nt, Homo sapiens
agccgggaggccggccgggccagcacccggccgagacggcggcagcagcggcacagcaggaacagacgccccaccaggccagcggggcgcagagagaac

SEQ ID NO: 257608 - RNA, 83 nt, Homo sapiens
cccggcggcgaggaaagcaggaggaggggcggcggcgggaagaggacgaacagcggggacgccccagcagaccgcccaggaga

SEQ ID NO: 257609 - RNA, 80 nt, Homo sapiens
agcgagggccccaccagcgcccagagcaggggcgggaagaagcccgccgccaccaccccaccaccagcgcagcagagaag

SEQ ID NO: 257610 - RNA, 71 nt, Homo sapiens
gaaccgaagagagggagacgcaggaggacaagcgccggcacgcgaccgaacgcaaagggaacgcaagaaga

SEQ ID NO: 257611 - RNA, 66 nt, Homo sapiens
cacggcgccccgcaaggaagacacagaaaagaaccccgacagcccgacgaaggaccaagcagaaac

SEQ ID NO: 257612 - RNA, 79 nt, Homo sapiens
gaaacaagggcagagccagcaaagggagacgccagaccgggaggaggcagggcgccggcggggcggcaacaaggccagc

SEQ ID NO: 257613 - RNA, 66 nt, Homo sapiens
gggagaaccagcaacggcaaacaaaaccacaggcacaaagaggccagcgcccaaggaggacaaacc

SEQ ID NO: 257614 - RNA, 72 nt, Homo sapiens
gccgggcgaggggagagcccagcacgaaagggcgacgcgagggcgcgagacccacggcggcagcaacaacag

SEQ ID NO: 257615 - RNA, 76 nt, Homo sapiens
agaagccgcaacaggaaagcagcccgaaaaagacgcgagaagccacacggagaagcaggccaacagcaaaaaacca

SEQ ID NO: 257616 - RNA, 93 nt, Homo sapiens
aaaaaagcaaacacgaggccacggggaaacacagcagaacacaggaacgcaaggcggggaaaaaaaggcagcacacagacgcagcaacgggca

SEQ ID NO: 257617 - RNA, 84 nt, Homo sapiens
agggaccacccccagcacccccgacccaccccggggaagcacaccccagcgcgggcccaggaggaccgcggaggagcagaagga

SEQ ID NO: 257618 - RNA, 78 nt, Homo sapiens
aagcaacaaggggaaggggcaaaagagcagagggggacagacaacagagcaacgcaacagggcacaagacagggcgaa

SEQ ID NO: 257619 - RNA, 68 nt, Homo sapiens
acgccagggcaaggccggcccaaagcacgccggccacggagagaagcagagcgacccccaaggaaaac

SEQ ID NO: 257620 - RNA, 92 nt, Homo sapiens
gcggccagcaggagcgccggggccggggcgaacgcggccgaaacgaaggaggcccaaccacaaaaggagccgacggaacccagacggagaac

SEQ ID NO: 257621 - RNA, 74 nt, Homo sapiens
cgccaggagcacagaagagcgaggagaacccaggagaaacgagagggacagcaaggaagacgccagagagcggc

SEQ ID NO: 257622 - RNA, 76 nt, Homo sapiens
cgcgcccgccgccagcaggggcgccccggacgagagcccggcgggggcgcagacaagaccaggaaagaggggacaa

SEQ ID NO: 257623 - RNA, 71 nt, Homo sapiens
agagcagcgaaaaggacaaacacggagagccaacaccgggcagcagaccgcacacaaaccaaagagacaag

SEQ ID NO: 257624 - RNA, 75 nt, Homo sapiens
aaaaccgaccagaagagaaagagagaagccaaaccccagagccagcggagagcacggagagcaagagagagccgg

SEQ ID NO: 257625 - RNA, 83 nt, Homo sapiens
gggcacccgcagcgcagaaggaaccggcaaagcgcaggaacgggaacgcaggagcgaccagggccacaggaagaacaggcagc

SEQ ID NO: 257626 - RNA, 50 nt, Homo sapiens
cccgcagcaaaaacggccacacgacacacagaaagcgaggaggccgggcg

SEQ ID NO: 257627 - RNA, 79 nt, Homo sapiens
cccccacggccggcccggccggaggcgcacaccccggcccgggagcgcagcccccgccggggacagcgcagggaccagg

SEQ ID NO: 257628 - RNA, 75 nt, Homo sapiens
cagcccgacgcaaaccaaggacggggaccgcacacccaaggccaaacccagacgcaaccacccccagagggaaca

SEQ ID NO: 257629 - RNA, 72 nt, Homo sapiens
ggccagcgccccaggccaagagggacccacccggcgggacaagagaaaaaaagggcgggcgaacaaaaagag

SEQ ID NO: 257630 - RNA, 71 nt, Homo sapiens
aaaacaacggaaaaaccagcaaagcggcggacaacagaagacaggcaaagacaggcccaccaccacggcga

SEQ ID NO: 257631 - RNA, 101 nt, Homo sapiens
cacaagggccgaagcagggcacaaaaccaaggccaagcaaggacaagcagaccggaagaccgacggaagaccacaccccgagggagcccaggacaccacga

SEQ ID NO: 257632 - RNA, 55 nt, Homo sapiens
cgaccccccgaccaccgccgacccaccgcggccccggggcagaagagcggcgccg

SEQ ID NO: 257633 - RNA, 68 nt, Homo sapiens
gaccagccagcacaacaaccgggagcacagcagcccagcagggggcccccggacagccggccgcaccg

SEQ ID NO: 257634 - RNA, 54 nt, Homo sapiens
cccgagagaggccggagaccagcgaagaaggaaacagaacaaggacgaaccgaa

SEQ ID NO: 257635 - RNA, 73 nt, Homo sapiens
aggccaagcagccaccagcagcccccagagcgggaccacagggagcagagggaaaggagggagcgggaagcaa

SEQ ID NO: 257636 - RNA, 54 nt, Homo sapiens
gaaacaccaccaacaaaccggccaaaggacggaacgcaccagacggaggcgaca

SEQ ID NO: 257637 - RNA, 74 nt, Homo sapiens
cgacaccggcgcagccagcgaacccacggaccgaaggccaagagcacgggaaggacaaacaaggagcgaagacc

SEQ ID NO: 257638 - RNA, 71 nt, Homo sapiens
acggacggacgccagccccacaacacgccgagacggcgcgcgggggccaccaacggcacggacagagcacg

SEQ ID NO: 257639 - RNA, 88 nt, Homo sapiens
cgaccgggcaccagcaggacccgaggccaggagccaggggcccagaagcgggaagcacaggagagcaggcacgaccccagcggcaaca

SEQ ID NO: 257640 - RNA, 38 nt, Homo sapiens
gccggagcccgacgcgaacagacgaccgaccagaagcc

SEQ ID NO: 257641 - RNA, 81 nt, Homo sapiens
agcccccaaaggcgggaaacagagacaacggcaacacgacaagaagccggcccaccgcagcacaggcgcgaggaaaggcag

SEQ ID NO: 257642 - RNA, 74 nt, Homo sapiens
agccaccagggaaggcgcaaagcaggaaaaagcaggaaggggaccaggagacgaaaagagaaagggagcaaaca

SEQ ID NO: 257643 - RNA, 86 nt, Homo sapiens
cggacgcgcgccgcggcggggaggcgcggcgcgccgggaacccgggccggacgcgccgcgcaacaagaacccggagcgaaagccgg

SEQ ID NO: 257644 - RNA, 77 nt, Homo sapiens
ccacccacaagcgcacaggaccggccagagagagacacgggggaaacccaaacagagaagcccaagaagagcagcgc

SEQ ID NO: 257645 - RNA, 74 nt, Homo sapiens
gaccgcccccaacaaccaggaaccccacaaggagccacccagaagcagagagccaaaacacgaacaaccagaaa

SEQ ID NO: 257646 - RNA, 73 nt, Homo sapiens
ggacaaggggcgaacccaagagaagggaggaggcaacagcagaaaagcaccgcagccggacggccaccacagg

SEQ ID NO: 257647 - RNA, 73 nt, Homo sapiens
gaggcagccccagaaggccaggaccgggaccggcgccaccagcaaaaccagagaaacaggcagagaaagacac

SEQ ID NO: 257648 - RNA, 56 nt, Homo sapiens
gacgcgcacgagggacggggaaagacggcccgccacgggccccgcagccgcgcccg

SEQ ID NO: 257649 - RNA, 57 nt, Homo sapiens
gaagggggccaaaccaaaagcacaacaaccaaacagccaagaagcggggcagcaaag

SEQ ID NO: 257650 - RNA, 77 nt, Homo sapiens
aagccccggccacccggcccccggcaccaggccgaaaacgaagcagaggaacaacaagggcccaacgaaccgaagag

SEQ ID NO: 257651 - RNA, 58 nt, Homo sapiens
cgggcacaagacgcggccgcgggcccacagcaggcgagcaccacaagccaacaaaccg

SEQ ID NO: 257652 - RNA, 53 nt, Homo sapiens
gcccggggcccgggacgagggaagcacacaaaagagggacaacacaagccaca

SEQ ID NO: 257653 - RNA, 80 nt, Homo sapiens
gcagcccgaacacaggagaacaccgaagacaagcccaaagaaagggaggagcacaaacgcccaccacacagcagaaacgg

SEQ ID NO: 257654 - RNA, 69 nt, Homo sapiens
aaacaggacgaaaaaagggcaagaagccagaaggccaagaagcgagagaagaaaaacagaaaaagccaa

SEQ ID NO: 257655 - RNA, 79 nt, Homo sapiens
gcgggagccgccgccggccacccggcaggaggcaaagggaccccaagaaaccaaagggcaagagccgcagcccggcaga

SEQ ID NO: 257656 - RNA, 42 nt, Homo sapiens
gccgaggcaggcggacaccgaggcggccgaacccgacccaag

SEQ ID NO: 257657 - RNA, 65 nt, Homo sapiens
cagcccgacgcaaaccaaggacggggaccgcacacccaaggccccacacaggacgagaaggagcc

SEQ ID NO: 257658 - RNA, 81 nt, Homo sapiens
agccgccccccaccgcccgggcccgaggaggcagccaagccgagccgccacccggcgccggacacccaacagcacgcagac

SEQ ID NO: 257659 - RNA, 93 nt, Homo sapiens
ccagagaaagcccgccgcaccagcaagcgcggggcgggcgcaaagacaccgccagaagaccagaggaccccggaggaagcagccgaaaacaac

SEQ ID NO: 257660 - RNA, 61 nt, Homo sapiens
gagaacaccccacagggaagaggaccgggagaagacaggaagaccggaaggccagagaagg

SEQ ID NO: 257661 - RNA, 105 nt, Homo sapiens
gcagaggagcgagagagaagcgggcgcagcacagaacgccaaaggcccgcaaggacaagggccccaccccacccgccccaccgggcaccgccccggagacagcac

SEQ ID NO: 257662 - RNA, 71 nt, Homo sapiens
ccgaagaggaagggcggccgggcccacacagccagcgcgcagagcgagaacgagagggggacagcagccgc

SEQ ID NO: 257663 - RNA, 73 nt, Homo sapiens
caagcaccaagcgccaggccggcgaagagaccgaagacagaaagacaagcccagaacgcccccagcggcgcca

SEQ ID NO: 257664 - RNA, 75 nt, Homo sapiens
gaggacccaccgcgcaaagacagggaagaaaacgccagagaagcagagcagcccggagcgaggggagaccgggga

SEQ ID NO: 257665 - RNA, 51 nt, Homo sapiens
cggcgcagggacccgggacagcggagaggaggagccaggaggagagaacaa

SEQ ID NO: 257666 - RNA, 80 nt, Homo sapiens
gaggggaagccaagcaaacgcagaaggacgcccacgagcaaccaagaacagccccgaagccaaggaaaaacggaagaagg

SEQ ID NO: 257667 - RNA, 78 nt, Homo sapiens
gcgcccgcgcggcgcggggaccgcggcccgacaagcagaccggaagaccgacggaagaccacaccccgagggagccca

SEQ ID NO: 257668 - RNA, 74 nt, Homo sapiens
gggcaagaaccgacaagccaccggcggaaagcgcagacggggcaccaggccggcggccgaacccgaccaaggga

SEQ ID NO: 257669 - RNA, 78 nt, Homo sapiens
caagaagaaaccagccggggggggcgcggcaaggaacagcgccgagcgggccaaaacagagggaagcaagacgcagag

SEQ ID NO: 257670 - RNA, 81 nt, Homo sapiens
ccgaccagcaacaacagacacggcacgcaaaacaaaaggggccaaggacgcacacaccagagaaggcagaccaagggcgag

SEQ ID NO: 257671 - RNA, 72 nt, Homo sapiens
cgagacggagaggaggcacacaccaacgagccacccccaagggcgagacaggcagcagccagggagcgaggc

SEQ ID NO: 257672 - RNA, 63 nt, Homo sapiens
gggcaacccacgggccgacgaagacacggaccagggcagagcagcagggagccccgaacggag

SEQ ID NO: 257673 - RNA, 68 nt, Homo sapiens
ggacaggagccaggcaaggacacaaagaacccgccgacacccaaacagacccagccagagagcaaaaa

SEQ ID NO: 257674 - RNA, 38 nt, Homo sapiens
cccagacccgccgaagaccccggaccggacggagaccc

SEQ ID NO: 257675 - RNA, 74 nt, Homo sapiens
ccaagcccgaggaaaaaacaaaaagaaaaacccagccccaaaaggaaagagaaaggagaccacaagaccccgcg

SEQ ID NO: 257676 - RNA, 98 nt, Homo sapiens
ggagccgacagcggaggggggaagaccggacccaaaccgaccaggggggcccagacgccacacgggaagaacggccagccaaaaagcgcagcaccagc

SEQ ID NO: 257677 - RNA, 72 nt, Homo sapiens
cagggaagcaaggccagcaaacagggcaaaggaaacaggagaaaggcaggaagcgcgccacagcaaagaaga

SEQ ID NO: 257678 - RNA, 68 nt, Homo sapiens
caccaacacgcacaagacggacgaaagccagagaaaaagcggagaaaaggcacggcccacacacgccc

SEQ ID NO: 257679 - RNA, 79 nt, Homo sapiens
ccacacaaaaccaggcgaacgaagaagcgggccacccacaaaagaaccaggagcggcagaccgccgccaggaggaggca

SEQ ID NO: 257680 - RNA, 71 nt, Homo sapiens
gcacaccagaacaacacagagccaagaggacaccagaaaccagaagggacgaggcgaaaacaacgaaggaa

SEQ ID NO: 257681 - RNA, 70 nt, Homo sapiens
ccccccccggaaaaggcccacgccgggcgaggcgcagagacaaggaagggaagcggagaaaaggagcaaa

SEQ ID NO: 257682 - RNA, 77 nt, Homo sapiens
cgagccaacccacagcgcaggaagacggccgccgcggccaggacgcagaaggacccacagaagcccaagggaaccac

SEQ ID NO: 257683 - RNA, 72 nt, Homo sapiens
cgagggaaagaacaaaccgcacgacacaggaaaggacaaaaccagaagcaggggccaggcagcaaagaacac

SEQ ID NO: 257684 - RNA, 38 nt, Homo sapiens
ccccacccgcgccgcgacccgaccggggaccccaaacc

SEQ ID NO: 257685 - RNA, 73 nt, Homo sapiens
ccggggggagcggccagcaggagcgccggggccggggcgaacgcggccggaacagcagccggaagcgagggcc

SEQ ID NO: 257686 - RNA, 80 nt, Homo sapiens
ggccgccagacacgggggaaaaccggcggcccaagacagggcacaagggcaggggccaccacacgaagaagccaagcccc

SEQ ID NO: 257687 - RNA, 88 nt, Homo sapiens
cacaggccgcgcagagcgggaccacccgggcacagcaggcacggagaagcccgggcccagagcccggccagcaggagcagggccggca

SEQ ID NO: 257688 - RNA, 67 nt, Homo sapiens
aacacagcaccacacgcccccaagacaacgaaggacagccgagcccccacagaagagggaaacagaa

SEQ ID NO: 257689 - RNA, 57 nt, Homo sapiens
gaagcgagagaaaagcccccaaaagcagcacaggggcccccgaggaagggcgcggga

SEQ ID NO: 257690 - RNA, 84 nt, Homo sapiens
acccccagcagcagcaacagcagcgccccccaccccaccgccaccgaggcccccccgccccccagacagaagacccgaccagaa

SEQ ID NO: 257691 - RNA, 71 nt, Homo sapiens
accaagaaccagggggcgacagacagcggaaagccccaggaggggcgggggcccaccaaagcagcgggccc

SEQ ID NO: 257692 - RNA, 84 nt, Homo sapiens
acagcgacacagccggacccccaccgcggccagccacgggacagaagggccccgcccagagcaccacccgagacacaggagccc

SEQ ID NO: 257693 - RNA, 80 nt, Homo sapiens
gcggcccgaggcccgcccagaggacaaagaacaacccgacggccgacgcaggacagcgcccaggaaccccagcacacaca

SEQ ID NO: 257694 - RNA, 84 nt, Homo sapiens
caggacgccgggagccgcaggggcggggcggcgccaagcgcagggagcccggcgagggcagcccaggacccaaggccagccagc

SEQ ID NO: 257695 - RNA, 75 nt, Homo sapiens
gcagacagcacaaccagcggacccgaacacggaagaaagacacgcaggaggccgcggccgagcagcgccacccaa

SEQ ID NO: 257696 - RNA, 79 nt, Homo sapiens
ccgaacaaacaaacacccagaaacaagagacagagaccaggggccacaacggaaaccaggaaaccgcagaagaaaagga

SEQ ID NO: 257697 - RNA, 72 nt, Homo sapiens
ggaacgaaaaagcccaggggaaagcggagcaaggacagacagagacgccaaggccccaaaggacaaagcaca

SEQ ID NO: 257698 - RNA, 77 nt, Homo sapiens
aacgcacgcggaagagcacgcagccgacggccccaggcccgcgggacccgccagagaaggacagcacccagacccaa

SEQ ID NO: 257699 - RNA, 68 nt, Homo sapiens
agacccacaaccgacgcccggaaagggggggaaacgccccagggggggaacagcgccaggaggcagga

SEQ ID NO: 257700 - RNA, 80 nt, Homo sapiens
gagaaggagcggagggcgcaagaagcaacaggaccccgccaagaacccccggggccagccccccgaggcagccgcggccg

SEQ ID NO: 257701 - RNA, 69 nt, Homo sapiens
gacggcggagagaagccgggagcgagcccaggcggcaggcggacgggccccgaagcccaaggggagacc

SEQ ID NO: 257702 - RNA, 80 nt, Homo sapiens
gcgggcgccgaaggagggccggcagcgcccgcggagacggaagagacaagcaagcccggaaggcccagccaggccaccaa

SEQ ID NO: 257703 - RNA, 108 nt, Homo sapiens
cccgaccgacacccaaggagccggaccacaccggaggcaggaccggggccaaaagccaaggaccccacgcaggacgagcgcgccccgcccccgggcggcaccccccgc

SEQ ID NO: 257704 - RNA, 55 nt, Homo sapiens
cggggaagccagcgaacgcagggcaaggcccaggacacacaaagacaaacacaga

SEQ ID NO: 257705 - RNA, 60 nt, Homo sapiens
aggaggacagcgcacacagcaagcacgagaccggagaagaacaagccgacccaaagccgc

SEQ ID NO: 257706 - RNA, 70 nt, Homo sapiens
gacgaggagaaaccagagcgccagcaaggcaggcggaaccaacgaaagccaaagagagggccgaaacaaa

SEQ ID NO: 257707 - RNA, 71 nt, Homo sapiens
gggaaaacagacggagaggaagcagcagaacccaaaaaagcagagaaagcaaacagaaaacacccacacag

SEQ ID NO: 257708 - RNA, 77 nt, Homo sapiens
aagacccagaaggcagaagcacaggcacaggggaaaggaagaaaaggccacaagagaaccaaggaaaagaagacgac

SEQ ID NO: 257709 - RNA, 80 nt, Homo sapiens
gacgcagggggagggccggggaacaggcccgcaccgcaggcccagaggacagagcagaagcgcacacaacagaagagaag

SEQ ID NO: 257710 - RNA, 89 nt, Homo sapiens
cgcagcgacggcgcgggagagcgcgccagccggccgcgagaggcgaaccgcgagcccagaaggcgagggacgaggaagcccaaggcgcg

SEQ ID NO: 257711 - RNA, 70 nt, Homo sapiens
aagcagcaaaggaaggaaaggccaaggccgcggaggaggagaacaccgacaacagcggaacagggcacaa

SEQ ID NO: 257712 - RNA, 75 nt, Homo sapiens
gccaggcaggcagaggggaccccggccagcacggacacacccgggggcgaacccagaaaaacacccgaaagaacc

SEQ ID NO: 257713 - RNA, 48 nt, Homo sapiens
aaaaccgggcgcagccgccagagaacccaaaagcaaacccaagaccga

SEQ ID NO: 257714 - RNA, 67 nt, Homo sapiens
ggccggccacagacaagaaggccgcaagcacacaagacagaagacgcgggaggccaaaccgacccgg

SEQ ID NO: 257715 - RNA, 50 nt, Homo sapiens
gaaaagaaggaaacacaagaaggcgaccccaggcaagggcgcgacaagac

SEQ ID NO: 257716 - RNA, 82 nt, Homo sapiens
cggaagggaaacgcgaggcgaagggaccggggaccgagagccagccaggagcccgcccaacagccgacacggagagacaagc

SEQ ID NO: 257717 - RNA, 79 nt, Homo sapiens
gcaagcacccagaaccaagaggaggaaaccgggagccggcccccaaccaagcgagggaaaaagcgggaggaggcgggcc

SEQ ID NO: 257718 - RNA, 66 nt, Homo sapiens
aaggaccaagaaccaggagaggaagaagccacgcagaagaggaaaagcacacggacagccaccggc

SEQ ID NO: 257719 - RNA, 74 nt, Homo sapiens
gagagcgcggagccgcgcccccggagccgcccggacaagagccgggaagcgggaaggcacggagcaccagcgaa

SEQ ID NO: 257720 - RNA, 71 nt, Homo sapiens
gccagaaggaagacaagcggaagacgagggagaccggaagcagaagaccccccggagcgagggaaaacgag

SEQ ID NO: 257721 - RNA, 71 nt, Homo sapiens
ggagccaggacggaacgagccgcagaagaagagcaggaggaagaccgccggcaaaaagaagacagaagaag

SEQ ID NO: 257722 - RNA, 79 nt, Homo sapiens
cccaccccagaagaccggccccgcaaccacgaaaagagggcaaaaaaaagggcaaagaccaccccgccacaaaaccaaa

SEQ ID NO: 257723 - RNA, 100 nt, Homo sapiens
gcgacgagcgcacgccacccggcagccggcgacgcacacaccacgcagggcggaaaacaccccaaaagccaaaagggaaaggaaaagaccaacaacagcg

SEQ ID NO: 257724 - RNA, 73 nt, Homo sapiens
ggcgccagagcaacgacacaaaagccaggaagacaagagcagaagaaacagaccgaaagacaacaagaaaccc

SEQ ID NO: 257725 - RNA, 68 nt, Homo sapiens
ccaaaagagaggcggcagggggaaggaacagccggacagcccccggaaccccaaagcaccgccaccgc

SEQ ID NO: 257726 - RNA, 81 nt, Homo sapiens
gccagagcccagccgcggggcccggggagaggaggggccggggcgggccgcaggcccagagggaggcacaacagcgaggac

SEQ ID NO: 257727 - RNA, 79 nt, Homo sapiens
acccccacaaagagaagccaagacccagcgacggggaggaggcgggccgaagcggaaaagagaagaggggaggagccca

SEQ ID NO: 257728 - RNA, 75 nt, Homo sapiens
cgcccaagagcgacagccccagaagcaagagaggaaaacagaagcgggcgaaaggaagccagaaccgaaaaccca

SEQ ID NO: 257729 - RNA, 80 nt, Homo sapiens
gcccagccaggagcaccccagcggagaaaaagcccgagcgccccaaaggcggcccgcagggcggaccacaagcagagaag

SEQ ID NO: 257730 - RNA, 55 nt, Homo sapiens
gcggaagaaggaaccccgaagagcccacaggcggggagcaccggaccaccccccc

SEQ ID NO: 257731 - RNA, 78 nt, Homo sapiens
agcggggccggggcgccgggccggccccccagcccggccccgcacagggcagcagccagcccggacacaggggaccag

SEQ ID NO: 257732 - RNA, 65 nt, Homo sapiens
ccggcggggcggggagcggagcgcccgaaccaaccaccgaggacgagaccccaaggcgagcccgg

SEQ ID NO: 257733 - RNA, 69 nt, Homo sapiens
gggacgcaggcgcaggccagaggcaccagaaaaaaaaagacagagaaaagaaacagaacaaagaaacac

SEQ ID NO: 257734 - RNA, 68 nt, Homo sapiens
gggacggggaaggccggggcgcccggcgccggccgagaaggcagaggcgacccgggaagaaaaggggg

SEQ ID NO: 257735 - RNA, 78 nt, Homo sapiens
aggccccccgaacagcaggcgccaccagcccggaggagcccacccccccccgccggagggaggacggcccgaccggac

SEQ ID NO: 257736 - RNA, 83 nt, Homo sapiens
gacagagcgcccgcaccggaggcagcaggggcgccggggccccgacgccagggcaagggcgcagcacgcagacccgcaagccc

SEQ ID NO: 257737 - RNA, 76 nt, Homo sapiens
gcggggcggagcgccgggccgcgcagcgccgaacgacgggccacaggccacaaacgaacagcgaaacggagaacgg

SEQ ID NO: 257738 - RNA, 60 nt, Homo sapiens
cagagacggcggagaccccgaaggcgcaaacgacaccacccgaccggacaagggagagac

SEQ ID NO: 257739 - RNA, 73 nt, Homo sapiens
aacacccggaccggacacgccgagcaaggaaggcggcgagacccgcaggccaccagcagaagagaggagagag

SEQ ID NO: 257740 - RNA, 58 nt, Homo sapiens
cgcgccggcccagcaccccgagaaccgcaggagccagagaaggaagaaccgccaaaaa

SEQ ID NO: 257741 - RNA, 81 nt, Homo sapiens
gggaggaaagccacagcgggaggaccgggaaggcaggaagcacagaagggagcaggaagaagagagccaagcgaacgccga

SEQ ID NO: 257742 - RNA, 82 nt, Homo sapiens
gaggaggaacgcgcaaggcaaagcaccggaaaagagaaccgccagcaagagcgcgcacgcaaacgggagagccggaaacggg

SEQ ID NO: 257743 - RNA, 74 nt, Homo sapiens
aaaagcagaaagggaaagaagccaggcaagggcggaagaaccacggcccagccggcgccgcgaaaaggaaaacc

SEQ ID NO: 257744 - RNA, 55 nt, Homo sapiens
gagaggaaagaagaaaaccaagaaagccccacgccggacacaagagggcaagaaa

SEQ ID NO: 257745 - RNA, 93 nt, Homo sapiens
gggggcagccccccgcccggccagccgccccgccgggaggaggggagagcaaacacgacggccagagaagaaaggaaggagccaagggagcca

SEQ ID NO: 257746 - RNA, 74 nt, Homo sapiens
ggaccccgaaggagcaggagcgagaccaacgggagccccaagacccccgcaagggaccgcgcaggagggaggaa

SEQ ID NO: 257747 - RNA, 72 nt, Homo sapiens
agagccgacggaaagagccgacggacggccggcgagggcacggggacgcacccgagaccccggacccagcgg

SEQ ID NO: 257748 - RNA, 76 nt, Homo sapiens
cccggagaccagaagaaccacaaagccaagacgcaagcgcggagagagaccacccagaagacagagaaggagccag

SEQ ID NO: 257749 - RNA, 71 nt, Homo sapiens
ggagaaggaccaagaaccaggcggggagccaggaacgggggacaaggagaggcacacacacagaaccacac

SEQ ID NO: 257750 - RNA, 76 nt, Homo sapiens
aagcgaggccagacagcaagagcacccgacccacaggccagagaggcaaaacagaggggaagacagcaaggagacc

SEQ ID NO: 257751 - RNA, 70 nt, Homo sapiens
gcaaaaggaagcaacccagaagagcgaaggacccagcgaggagggcaagaacgccccggcaaggacggag

SEQ ID NO: 257752 - RNA, 85 nt, Homo sapiens
ccccggcgccaccggagagaggccgcgccgggcagagaccaagacacccaggagaaagacagcggggaaaagaaaaaggaggggg

SEQ ID NO: 257753 - RNA, 97 nt, Homo sapiens
accgcggagcaaggaaaagacccggaaagaagagacacagaggagccacacccccaggccggagcgcgaagacgcagggaaagcggcacacgaaagg

SEQ ID NO: 257754 - RNA, 66 nt, Homo sapiens
cgggacccggcgaagacgcgaccgcggcgcgagcaccagccggccaggggcaaaggagaggaagag

SEQ ID NO: 257755 - RNA, 60 nt, Homo sapiens
ggccggccgcagcacccgccaccgcgccggccgcccgcacgccgccggagcggcagccca

SEQ ID NO: 257756 - RNA, 37 nt, Homo sapiens
ccggaacagacgcaggaaggagacaggagggaccggg

SEQ ID NO: 257757 - RNA, 55 nt, Homo sapiens
gggaaccagcaaggccaagcggagaacaaccccaccagacagccggcccaaacgg

SEQ ID NO: 257758 - RNA, 79 nt, Homo sapiens
cgggcccacagaaaagcagcccaacgaaaaccgcgaaggagcaagacgagaacaacgacaaaagaaggggcggggcagg

SEQ ID NO: 257759 - RNA, 56 nt, Homo sapiens
gcaccacggaggacgcccaagcgcggaagaaaagaggagaaagagcccagaggacc

SEQ ID NO: 257760 - RNA, 86 nt, Homo sapiens
caaggaggagagcaccggaacccccaccagaagcaggcggggccccgggagacgggcgggagagagcaccaacccgagaacagcga

SEQ ID NO: 257761 - RNA, 77 nt, Homo sapiens
ggcgggcccgcccccgaagcacccccccagcccagaaggaaacggcccgcagggggcggaacaggccaggggcgacc

SEQ ID NO: 257762 - RNA, 75 nt, Homo sapiens
agaggaaaccaagaacgaaaagccaagaacaagcacaagggcaaggccagagaaggcgggagaaagacacgaacc

SEQ ID NO: 257763 - RNA, 74 nt, Homo sapiens
cccagaaacagaacaaacacagaaaaggagaccacggaagacggacaggcaaaagcggaggaaaagagaaaaac

SEQ ID NO: 257764 - RNA, 87 nt, Homo sapiens
aaggagcccaggaagcagacaaggacaggagaagagcaagcacccgagaccgaggacgagaagaagcgcgaggaaggcaaagggcgg

SEQ ID NO: 257765 - RNA, 86 nt, Homo sapiens
ggcggcgggacagagcgccgcgaccccagcgggcccggggaggcaccgacgaggaggaccaccaaggagcaccaaggagaagagcc

SEQ ID NO: 257766 - RNA, 74 nt, Homo sapiens
cagccacaccaggcccagaggccaggcagacccagccaaaccggaaaccaagcacccaaaaggccacccaaaca

SEQ ID NO: 257767 - RNA, 81 nt, Homo sapiens
aggaaacgggagcgagggcgagggcgacggaaaccaagccagagacaagaggagcagcagcggcaccgcccccacccggag

SEQ ID NO: 257768 - RNA, 71 nt, Homo sapiens
ccacccacaagacgccacaggccggcaacgccagcacgggggagccggaccccaagaccaaaccggcagga

SEQ ID NO: 257769 - RNA, 42 nt, Homo sapiens
cccagcaccgggaggccgaggcggagccacgcccagcaggaa

SEQ ID NO: 257770 - RNA, 81 nt, Homo sapiens
ggacacacgcgccggcgcgcacacaccacgggcgaggcaacgggcgaaccgaccaagaacaacacccagagggccaggaga

SEQ ID NO: 257771 - RNA, 69 nt, Homo sapiens
gggccgagagccgcccgggccagcggccgcgcacccccggccggaggcaccagcagcagcagcagagaa

SEQ ID NO: 257772 - RNA, 85 nt, Homo sapiens
ccgggaggagaaggaaggcaggaaagccagccggcgagagcaggcgcgggggcaggcagggcgcgcgggccaaggcccggccaac

SEQ ID NO: 257773 - RNA, 83 nt, Homo sapiens
gagggcaaggcgccagaccaagaggcgcagcagccccagccaggcaggaaacacccccaggagaggcagccagaggccgacca

SEQ ID NO: 257774 - RNA, 68 nt, Homo sapiens
cgcaaaccccacgggagggacagggggagaaacacccgaacgaaggaggagacgacaccaagaggaaa

SEQ ID NO: 257775 - RNA, 90 nt, Homo sapiens
ggaaggccggaggaccccagagaaggacccggggaccggggagagggcgagaggggaccggagcaacaccccccaggccagaacagcgag

SEQ ID NO: 257776 - RNA, 74 nt, Homo sapiens
cgcggcgagcccgggggcccagggaggggccacgggaaacaggcacagaggcgggaagaggccacaagggagaa

SEQ ID NO: 257777 - RNA, 73 nt, Homo sapiens
aaccacagaaaacagaagagccccacagagcccccagagcccaagggcccccgcgaagccccagagccgccag

SEQ ID NO: 257778 - RNA, 68 nt, Homo sapiens
aagccgccacgcccccccaaacggacagaggcgaacggcagcgcggagggggccgcacggaggacacg

SEQ ID NO: 257779 - RNA, 77 nt, Homo sapiens
aggagaacacaaagagaagacaaccaaacccaccaccggcagcgcccgcaaggccaagccggcgaagcccgcgcgca

SEQ ID NO: 257780 - RNA, 55 nt, Homo sapiens
cgcgaaacgcacgagaagacacagcgagacagcccggcccaccacagaggaaaac

SEQ ID NO: 257781 - RNA, 73 nt, Homo sapiens
gcagcgaaaacccaacgagaccaaagaggcaaggacaaagggaacgcagagcggcagcgagagccagagaccg

SEQ ID NO: 257782 - RNA, 74 nt, Homo sapiens
cgccggggggcagggccacgcgcagagcccgagggaagaggaaagcacaaagacacccaaccccagaggaaaca

SEQ ID NO: 257783 - RNA, 83 nt, Homo sapiens
cgggaggagccgggcgcagaaccagaccgggagcacgcacgccacgaagccgccagagcccagcagaaggaacgcggaaccgc

SEQ ID NO: 257784 - RNA, 40 nt, Homo sapiens
cggacagcggggcccgcggaaaacagaaaagagagccagg

SEQ ID NO: 257785 - RNA, 78 nt, Homo sapiens
aaaagaggagcagacacggggcaggcgagcccgccacagagccgaaagcacaagagggccagggaccaggggacgccc

SEQ ID NO: 257786 - RNA, 78 nt, Homo sapiens
gggacggaccgagaccggaccgagagcggaccgagagcgcgaaacgcacgagaaggggccgccaacccgggccaagga

SEQ ID NO: 257787 - RNA, 77 nt, Homo sapiens
gaaagccagggcaaagaccagccacaagggcgcagaagccggcagagcccaagagacaacaagccgaaaagagaggc

SEQ ID NO: 257788 - RNA, 83 nt, Homo sapiens
cgagcccaggagccaccacaagaccaccaccagacagaggccagagcaggccacacccaagaccaggccaggcagggcaagaa

SEQ ID NO: 257789 - RNA, 76 nt, Homo sapiens
cgcaacagacaaagccgacagggcacccaaaaagagaggcgagaacacggaaagcccagcagcaaacaaaccaaac

SEQ ID NO: 257790 - RNA, 89 nt, Homo sapiens
acaagagcccgcgggcacgacccggcgcagcccagacgccccccaggccggggccaccacagcaccaccaccaccacccaaggaggggc

SEQ ID NO: 257791 - RNA, 79 nt, Homo sapiens
caggaagaagacagaaaacaaagaacggcgcccagcacggcccccaaacgcaggagaaagggagagcacccccaccagc

SEQ ID NO: 257792 - RNA, 79 nt, Homo sapiens
gcgcgccgacgcgggaaaccccccccaccccaccagggaaacggaaacggccagaagcaggacaaagcagagaacaacc

SEQ ID NO: 257793 - RNA, 74 nt, Homo sapiens
cccaacagcgaccggcgcggcaagcacaggacaccgaagaaaccacacgacacggaacaaagcaaagcagcggc

SEQ ID NO: 257794 - RNA, 70 nt, Homo sapiens
ggcgcgcccaccaacaggccaaagagccccaggacgagacaaggacacacccagaaagagccaaacgagc

SEQ ID NO: 257795 - RNA, 78 nt, Homo sapiens
gcccggggcaaccggagccccccaggaggaccagaaccgagaagcagcccgggaggagaaaccaacagaccccaccag

SEQ ID NO: 257796 - RNA, 56 nt, Homo sapiens
accgcacgacacaggaaaggacaaaaccagaagcagggaggaccagggccaggggg

SEQ ID NO: 257797 - RNA, 79 nt, Homo sapiens
cacccagagcaccacagaggcgaaacacaaaagaagacgggggacaggagagaggacgcgggagaaggagaagaagaaa

SEQ ID NO: 257798 - RNA, 54 nt, Homo sapiens
aaccgaaaagccacaaagggaaccaggaaaagaggcgacacgggaaacgcaccc

SEQ ID NO: 257799 - RNA, 67 nt, Homo sapiens
ccacgcgcacgaccagacaggagagacaacggaggcaagaaagacggagaagcgagaagagaccagc

SEQ ID NO: 257800 - RNA, 62 nt, Homo sapiens
ggagacaggcgaggccgaggggaggggcaggacaaaaaccggcccagacggaaggaacaaca

SEQ ID NO: 257801 - RNA, 67 nt, Homo sapiens
acggcgacacgcgccccagcagacgcccccgccaccccacaccggaagccgggcacaaagccagcga

SEQ ID NO: 257802 - RNA, 86 nt, Homo sapiens
ccgccagaccagcaagaggaggggcccggagagggggaagggcccaaagccagaagaagaagagccaaagcccaggacggggaaac

SEQ ID NO: 257803 - RNA, 76 nt, Homo sapiens
cggagcagacagcagcagaccaagcggagaacagcggaggagcagacaaaggggaccaaaacaaaacgagagcaag

SEQ ID NO: 257804 - RNA, 77 nt, Homo sapiens
gggacgggccaagaccgaggagagcgcgccccgaaacagagcgaagacccgaaaacgccaacgccagccagaaccac

SEQ ID NO: 257805 - RNA, 77 nt, Homo sapiens
ggagcgggaggcgggccagcgacaaaaagagggaggacaccaggagaacgaagcaaaagcgggccgggaccggcaca

SEQ ID NO: 257806 - RNA, 76 nt, Homo sapiens
ccaccgcaggaccacccacggcaccgcaccaacgaccgaagcaccaggcacacccacaagccgagcgcccagggac

SEQ ID NO: 257807 - RNA, 76 nt, Homo sapiens
ccaccagacgagaccccccagcaagggaacggaggaaagagaaaggacgagccacccacgccagacaaaacccgaa

SEQ ID NO: 257808 - RNA, 75 nt, Homo sapiens
cagaggcaccaaggaccccaagacaggcgaagagccaccagcggcgacgcaggccaaaaccaggaccggagaaca

SEQ ID NO: 257809 - RNA, 78 nt, Homo sapiens
cgggaacacagcggccaccacccgaggggcagcagccgagggggaaagaaagccgcaaggacaggaaaggggcaggga

SEQ ID NO: 257810 - RNA, 75 nt, Homo sapiens
gacaaggagagcaacacaaggaagcaagggccaccgcccagccaaccacagaacgccgaccaggacagcgcccaa

SEQ ID NO: 257811 - RNA, 86 nt, Homo sapiens
cgcgacgagacccgaccagcgggggcgcggcggccgcgcagccacccaaggaaagccaggccagaagaaggaaggccggggagggg

SEQ ID NO: 257812 - RNA, 79 nt, Homo sapiens
cggcagccccggggcgcggacagaaggagaccggagccgccccgccagaaagccaggggcaccaccacagaaggcccac

SEQ ID NO: 257813 - RNA, 86 nt, Homo sapiens
ccaaccccgggccggcggcggcggccaggcccgcgaacacacgccgccaccgggaggcccagggaagcagcagccgcccaaaacac

SEQ ID NO: 257814 - RNA, 83 nt, Homo sapiens
agagcaccgcagaagaaaccaagcggacacgacaagagcgaaggcggaccccggcagcaagcaacagagcgccaagcccccgc

SEQ ID NO: 257815 - RNA, 61 nt, Homo sapiens
acggggaggaccaccaaagggaagcccgcggcgggaagccccggggagcagggcacaggcg

SEQ ID NO: 257816 - RNA, 77 nt, Homo sapiens
ggaaaccaagccgggcgcccgcaaggagacgacgaggagcgccaggaaagaggcagagacgaagcagaagcgaggca

SEQ ID NO: 257817 - RNA, 72 nt, Homo sapiens
gaccaaaaacacgagagggcaaggacagcaaaagacggaacacaacaaaccccgaaggaaaggaaacccaag

SEQ ID NO: 257818 - RNA, 83 nt, Homo sapiens
ggagacgagaggacgggaccaggcgaagcggccgagcaggcgagcgaacgacgaagacgaccccgacgcaggccaggagccgc

SEQ ID NO: 257819 - RNA, 75 nt, Homo sapiens
ggaaaggaaacaaaacgagcaaacacaggaacccaacgagccaaagaccaaaaggaaagcccggccgagagacag

SEQ ID NO: 257820 - RNA, 76 nt, Homo sapiens
cggccccaacggaacagacccgggaagccagggagaagaggagccccaggaaagagcaaggacaggaggagcagcc

SEQ ID NO: 257821 - RNA, 68 nt, Homo sapiens
ggccgaaccagagcgagggaagaaccgccaaagaggaaaccaaggcacagaggacccaagccgacagg

SEQ ID NO: 257822 - RNA, 79 nt, Homo sapiens
caccaggcggggcgcacccggaagaacccaagaaggcagaagccagccccgcaggccgccacccgcccccgggccgccg

SEQ ID NO: 257823 - RNA, 80 nt, Homo sapiens
gcgaggagcgcaaggcgaggacccaaaggggacaaacccgggagaacacccccccaggaggcgagaagccgcaggaccga

SEQ ID NO: 257824 - RNA, 83 nt, Homo sapiens
agcagaggcggagcccgcagaccgcagaaggccggagacaccagcagccacgaagaccgggcgccagggccgccgccccgccc

SEQ ID NO: 257825 - RNA, 82 nt, Homo sapiens
ccgggaacgacgcagagccgaggcagaagacggggcccgggaccacaggccccggcccagagaggagacacacagccccaga

SEQ ID NO: 257826 - RNA, 65 nt, Homo sapiens
gaaaaacacacggccggaaaggcgaccaagcaacaagaaagaggacgccgccagccaccggcgcg

SEQ ID NO: 257827 - RNA, 61 nt, Homo sapiens
ggccccggcccacaggggggggcaaacccgagagaacggacccaaaaacgaggggcacgag

SEQ ID NO: 257828 - RNA, 59 nt, Homo sapiens
cgccccccagaggacaagggacccgaaccccacaaggggacccccgcagccaccgcagc

SEQ ID NO: 257829 - RNA, 79 nt, Homo sapiens
aaagagaggagcggggacgcggccacagcccacgagggcaccaaaaacaaggacgggcccagggaacacgggagccccg

SEQ ID NO: 257830 - RNA, 75 nt, Homo sapiens
gaaaaaacagacagcccaaagaagcgcaggggaaacaaaaccgaggaaacagggcaggccaccaagaaacccaaa

SEQ ID NO: 257831 - RNA, 70 nt, Homo sapiens
gcacaggaacacaaacggaaaagccaacagcagaaagaacaggacagagccacgaccaggggacaccccc

SEQ ID NO: 257832 - RNA, 53 nt, Homo sapiens
cagcggccaagaccaccgagccagagcaagggccagagaaggaggagaaggag

SEQ ID NO: 257833 - RNA, 87 nt, Homo sapiens
aacaaaagagccacccaagaggcagaaacggggacacaagcgaaaggcaacggcgcacagaacaaaggacgagccaaagagccagcc

SEQ ID NO: 257834 - RNA, 77 nt, Homo sapiens
caggagcagccccggagagaagggaaaagcagcgcacacggggacacaacgacaagaccggccccccaaacacccga

SEQ ID NO: 257835 - RNA, 79 nt, Homo sapiens
ccaggccgggacacaagaaacaaacgaagcacccccagacaagcagaccggaagaccgacggaagaccacaccccgagg

SEQ ID NO: 257836 - RNA, 83 nt, Homo sapiens
cggccgaggaggcagcgcgaccccgcacggcccagaaaaagagaccaggagcgcgcaaaaggagacacaaacgaagaagaacg

SEQ ID NO: 257837 - RNA, 114 nt, Homo sapiens
caagcgagaaagcacgaggcacccccggaccagaacggcacggccacgggcgggcaggcaaggcagagaacagcagaccacagcagggagcgggcgcaccacaggaagcgcagg

SEQ ID NO: 257838 - RNA, 69 nt, Homo sapiens
agcaccaaaaccgaaccagaacgaagacgccccgcaaacaccagaaggaagaaaccaaacgaaacacaa

SEQ ID NO: 257839 - RNA, 78 nt, Homo sapiens
caaaaaggaagcaagagcccaaaacaacaagaaagaaacccaagagagaacgaggaacagagaaagcggccggcccag

SEQ ID NO: 257840 - RNA, 80 nt, Homo sapiens
gccccaggggacgaggggaaacaaaggaaagggccagggaagagcgggggccggccacacaccccagcgggcccagggac

SEQ ID NO: 257841 - RNA, 81 nt, Homo sapiens
cccaagaagaccacagagggacccggacaaccagaggcagccagcagggggaggccacggggacagggacccacacaccgg

SEQ ID NO: 257842 - RNA, 58 nt, Homo sapiens
ggacgaacccaccgcagaaagaagggcaggagaaacccagcgggcccagagacgcagc

SEQ ID NO: 257843 - RNA, 69 nt, Homo sapiens
acggacaaaaaacaagaaccagacaagcggaaaaacagaaccacaggaggccgcgaagagccagaagag

SEQ ID NO: 257844 - RNA, 58 nt, Homo sapiens
gccacgggcacccacccgcaggaggggcagcagcaggacagggaacccgggagacagc

SEQ ID NO: 257845 - RNA, 85 nt, Homo sapiens
ggaagccgggagagaaacacagagccaggacacgagccccagggacgccgcaccaccaaagaagggcgggcagacaaaacagcca

SEQ ID NO: 257846 - RNA, 41 nt, Homo sapiens
caccccaccgcgcagggagacccacgagaacacaaagacaa

SEQ ID NO: 257847 - RNA, 77 nt, Homo sapiens
cgagcgcgaggaaaaggcggcgggaggagcacccgcccccacacgaacccgacacacagcaaagcgaaggagaacca

SEQ ID NO: 257848 - RNA, 84 nt, Homo sapiens
cgggcaccacagaaaagggaccaagaaaggcccagggaccaaagcccggacaaggcccgagcaccaggaccgcagaaggcccca

SEQ ID NO: 257849 - RNA, 82 nt, Homo sapiens
gaagcccaaaccacaagccacaaaagggcaacgggcagaggaggaggcagcgccgggaggacagacaaacagacacaaccgc

SEQ ID NO: 257850 - RNA, 80 nt, Homo sapiens
caccgcacacccgacacagcggagcgcccagaggcgagcccggggaggaagagaccgcacgaggacagcggccccaccca

SEQ ID NO: 257851 - RNA, 41 nt, Homo sapiens
gcagaagaagcgaggagaagaagaggccaaaaggcacacag

SEQ ID NO: 257852 - RNA, 71 nt, Homo sapiens
gcgcggggcggacgcggcacgggcacaaagccacggaggagagcagcacacagacggccgaggaaaggaga

SEQ ID NO: 257853 - RNA, 69 nt, Homo sapiens
caggcagagaggagaaggagagccccaacccaagaaaacccgaggggaaggcgccagacacagaaaaga

SEQ ID NO: 257854 - RNA, 68 nt, Homo sapiens
cagagcacaacagccacaccccaggccacgcagaacaaaagacgcacagagacggaccaaagagcgac

SEQ ID NO: 257855 - RNA, 54 nt, Homo sapiens
ggccagcccccagagggaggccaccggcaagggaagagcaaagggcccagaacg

SEQ ID NO: 257856 - RNA, 58 nt, Homo sapiens
gaagaaggagagaaggggaagacagcccggagcggaagaaaggggacccggagagaag

SEQ ID NO: 257857 - RNA, 61 nt, Homo sapiens
caggaccgggcaggagcgaaggacccaaagacaggaccacgcaccagcagagaaggaaagc

SEQ ID NO: 257858 - RNA, 69 nt, Homo sapiens
caggacagcggcggcgggccgggcagcccggccgacaaccacggggagccgccaccaaaagcagacgga

SEQ ID NO: 257859 - RNA, 66 nt, Homo sapiens
caggagcccgagagagaagggccgccggcccgcccggggggaccccaccagaggacagccagccgg

SEQ ID NO: 257860 - RNA, 55 nt, Homo sapiens
agagccggaggcgagccgcgcgggagaaaaggaaggggaaccacagcaggaacga

SEQ ID NO: 257861 - RNA, 84 nt, Homo sapiens
ccgcgcccgacgagccgcaggcgcccagaaggccgagcccggccacacagcaccgacacccgcggccgaaaccaccccgcgggc

SEQ ID NO: 257862 - RNA, 74 nt, Homo sapiens
caggcggagcgacggggaggcgcggccaacggggccacaagaccccgcgagcaaaggaggaggaccacaccaaa

SEQ ID NO: 257863 - RNA, 59 nt, Homo sapiens
caagaaccgcccccagaccaggaggcgagcacggaaacgaaggagcaagggcaacaccc

SEQ ID NO: 257864 - RNA, 69 nt, Homo sapiens
gaaaccccagaccgaaaagcaaagaagcagcaacgagggccaaccagcagaaggaggagcagcacgagg

SEQ ID NO: 257865 - RNA, 86 nt, Homo sapiens
ggcggggacacgggccgcgcgaaaaagagacagggcagggcagcagcacgaccgacccagcagccccggcagacccagggaacgga

SEQ ID NO: 257866 - RNA, 56 nt, Homo sapiens
cggcgcaggaggagccgaggcgagccaacagcacgcaaggacacggagccagcgaa

SEQ ID NO: 257867 - RNA, 69 nt, Homo sapiens
gccaagagggcgcccagagacaacgagagaacgcgggcgcggacggcaggggcgccggggaacccgcgg

SEQ ID NO: 257868 - RNA, 75 nt, Homo sapiens
gacccaaacgccaacagaaacgcaccaccaaggcggggagacaaccccccccaagaagcgagggacaagcacgac

SEQ ID NO: 257869 - RNA, 84 nt, Homo sapiens
accaccgcagcaccagcgcgggccgagacacaggacagcggaagcagagcgcggcccggcgcgcgccgacaggacgcccccgac

SEQ ID NO: 257870 - RNA, 63 nt, Homo sapiens
aaaaggaaccgaggcagacggagcggacggaaagaacagagaagcacaccgacaaaagggagg

SEQ ID NO: 257871 - RNA, 68 nt, Homo sapiens
cgcgcacaagcccaacagccagggccaggcgcagacccccaagaggagcgcgccagggccccgcgggg

SEQ ID NO: 257872 - RNA, 88 nt, Homo sapiens
cagcagccgccggagccagccaacgagcggggcaagaaaacacagggacaacgaaaacagagcccaaaaaacaaagaagaaaagcaac

SEQ ID NO: 257873 - RNA, 74 nt, Homo sapiens
ccaaaacgagggagaacacaccgagccagcagcagaaacagaagacgcacaaccggggggaacacacggcgacc

SEQ ID NO: 257874 - RNA, 72 nt, Homo sapiens
ccagacagccgcgaggccaaaaagaacgacgagcaggacgaggcaaaaaagagacaggagacggaaaaaagc

SEQ ID NO: 257875 - RNA, 70 nt, Homo sapiens
gcaaaccccggcccagacaggcccaccagagggggcccaaggaaacaacggcgcaggcagcaagacccac

SEQ ID NO: 257876 - RNA, 88 nt, Homo sapiens
cgggacgcgagcggcgagccggagcgcggagcccggccccgcaccaggaggaggacgacagcacgaggagcgccgcgcccaggcggag

SEQ ID NO: 257877 - RNA, 70 nt, Homo sapiens
gcgcccaaaagccggcccccggaacaagaggagaccaagaaaacgaagaaagaaaagaaaagaacaaccc

SEQ ID NO: 257878 - RNA, 79 nt, Homo sapiens
aaaagaagccagcccaaggacgccacaagaagaagcgacaggaggcaagaggagagggcagacgccgaggaacccacag

SEQ ID NO: 257879 - RNA, 57 nt, Homo sapiens
aaccagaaagcagcagcagaaaacgaaggaagaggagacagcagcgcccaaggacaa

SEQ ID NO: 257880 - RNA, 75 nt, Homo sapiens
aagaggggaagagacagaggaagagaagaggaggacagggaaagcagagccaagagaacccaaccaaacagggag

SEQ ID NO: 257881 - RNA, 76 nt, Homo sapiens
gggcgcaccgccccccgccgcgaagcacacgccgccccgacgcgagggcagccccgccagggcccgagagaagaaa

SEQ ID NO: 257882 - RNA, 80 nt, Homo sapiens
gacggggcgccccacagaggggcgacggaaggaagggaacacggacgacgagacacgaccaacacaggcgaccaaacgag

SEQ ID NO: 257883 - RNA, 56 nt, Homo sapiens
agcaaagacacagcacaagcgccacgagaaggacagccagacaagaccccaacgaa

SEQ ID NO: 257884 - RNA, 80 nt, Homo sapiens
aggagaaggagcggcaggcgacgaggaggcggagcggacaaaggcacgaagagccaggacaaacccaccgacggggaaaa

SEQ ID NO: 257885 - RNA, 66 nt, Homo sapiens
gaaccacacccaggacaaggggcacacaaaaggacggcgagagccgggcaccggcccccacggggc

SEQ ID NO: 257886 - RNA, 72 nt, Homo sapiens
ggaaagacaagccgggagcagacaagaggcaggaaaaggaagagcaaaaacaaaaacccagcagacaaaaga

SEQ ID NO: 257887 - RNA, 77 nt, Homo sapiens
acagaccaagacaaagacaggagggcacgcggaaaaggaaaacggaaaccggaaacaagagacggcaagaagcaaca

SEQ ID NO: 257888 - RNA, 71 nt, Homo sapiens
aaaggcgggcacaggccgaccgcgcgcacagccgaaggagcacagcacccccgacccacggccaccaaaaa

SEQ ID NO: 257889 - RNA, 56 nt, Homo sapiens
caaccaaagaaagccgacccagaaaaggaagggagaaccacaccaggcggcccagg

SEQ ID NO: 257890 - RNA, 72 nt, Homo sapiens
cagagaaaaaagagcagcgaggcgaaagcaaccacaggaaacgagggaaagagcacggaccgcggaagcaag

SEQ ID NO: 257891 - RNA, 68 nt, Homo sapiens
cgccaggccagaaacgccacagagcggagaaccccgccaaccagaggcaagcacaaaccagaggaacc

SEQ ID NO: 257892 - RNA, 79 nt, Homo sapiens
accgacgggccgcgaggggaagaggaagcaaagccaaggcgcgaagggcccgagaaagagcaggaagaaaaggaacaag

SEQ ID NO: 257893 - RNA, 75 nt, Homo sapiens
gagcaagaccaaagagcccgccaaaggcccaaaagggagaaaccacgaaacccgaagaccccgccagcgaaacag

SEQ ID NO: 257894 - RNA, 86 nt, Homo sapiens
ccccagcccgccccaaaagagaccgcacccgagcaggagggggagccacgcgcccccagcgcccggccccgccaccacggcacccg

SEQ ID NO: 257895 - RNA, 79 nt, Homo sapiens
cacccagcagaagaaagggaaggaacacgcgcaacgcggccgagggagaagcggaaggcggcaggaccaggcgggacac

SEQ ID NO: 257896 - RNA, 78 nt, Homo sapiens
agaacagaacaagcccaaagccccaaaagaggaaaggccgggaggcccagcccccgcgcggccggaggccggagcccc

SEQ ID NO: 257897 - RNA, 70 nt, Homo sapiens
cgggaggcaccgagaggaaaggcgagggaagcgccgggagaggcaccggaacccaacaacgccgaagccc

SEQ ID NO: 257898 - RNA, 110 nt, Homo sapiens
cggggcgccagccgggccacggagaggagcagcccccggagacagcggcacagagggccgccaggcgaaagacaccagcacccgaggccagcaacaacaccgccagcaag

SEQ ID NO: 257899 - RNA, 89 nt, Homo sapiens
cggaaccggcccggcggcaccgaaggaccagccaccaggagagaacgccgcgccgcgcgacaacggcccggcaggcaaggccggccgcg

SEQ ID NO: 257900 - RNA, 74 nt, Homo sapiens
gaggggcggaacacccgccaaagcagagaaaagaaagacagccaaagcacacacccgacaggagcgcccgggcc

SEQ ID NO: 257901 - RNA, 69 nt, Homo sapiens
ccaggaagcccccgaagcccccgccgccgcgagaaggcggagggcgaacgaacgcccgccagaagcccc

SEQ ID NO: 257902 - RNA, 31 nt, Homo sapiens
cacacacgaaagacagggccacaaccaaagc

SEQ ID NO: 257903 - RNA, 72 nt, Homo sapiens
acaaccagaaccccaggaagcgaagaggaacgaaagaacccgaagacaaccaaaagacacacaagcaggagg

SEQ ID NO: 257904 - RNA, 85 nt, Homo sapiens
gaaaacggagagcagcagccgcccgccaaccccaggggaccagaggaaccagcccgagcgaacaccggcagagagagagacacac

SEQ ID NO: 257905 - RNA, 55 nt, Homo sapiens
accaccgaagacagaggacaggcccaggaaacaccagaaacaggaagaaaaaaag

SEQ ID NO: 257906 - RNA, 41 nt, Homo sapiens
ggagaagagagcggcggaagggacaagggaggcgaggacgg

SEQ ID NO: 257907 - RNA, 73 nt, Homo sapiens
gacaaaaacccaaagcagcccccacagagagcacacaaacaaagcgaaaccacggaagaaaagggcaaaggaa

SEQ ID NO: 257908 - RNA, 58 nt, Homo sapiens
agacacccaaacccgcgcacaggcaccgggcccgagaacccgaagagcccacggaggc

SEQ ID NO: 257909 - RNA, 74 nt, Homo sapiens
cagggcagcggacccccccgggacccgggagggccggagcgggagggcccaggacagaaggcgggcaaggagcg

SEQ ID NO: 257910 - RNA, 76 nt, Homo sapiens
cgaaggcccacaggacaggagagaaagacggggcaaaagcagcgagagcaagcagaacggaacgcgaggaagaaag

SEQ ID NO: 257911 - RNA, 94 nt, Homo sapiens
aaggggcccaagaagaaccagagaagaacaccagaaaaagaaccacgccgacggaaacagcgcgaaaacacgacgccaggcaggaggacacaag

SEQ ID NO: 257912 - RNA, 79 nt, Homo sapiens
cggggccagcgcgcagaggcgggcgcggaggcggcagaagggaccgcggacccagcccgcagccaggaaaagagggccg

SEQ ID NO: 257913 - RNA, 77 nt, Homo sapiens
cgccgccgggcgggcccgcagaggcgaccgggagacccagccagaccgcccagacggaccggaggggaggggacccc

SEQ ID NO: 257914 - RNA, 78 nt, Homo sapiens
gaaaacagcaccagggccggaggccagggcagagacgacggcacacaacagaacccagaggaagaccaaaccagcaac

SEQ ID NO: 257915 - RNA, 78 nt, Homo sapiens
cccagcccaccaaacacgccggaaaccccgcccacagcacgagacacggaaccagaggcagcagcccaaccccgagga

SEQ ID NO: 257916 - RNA, 71 nt, Homo sapiens
caacagccccaacccagaaagcagaggccagagcggagacagacgggagaaaagaagcagcccacgaaccc

SEQ ID NO: 257917 - RNA, 70 nt, Homo sapiens
cgcaaggcgcggccccggagagacaagggaggcgaggacggacaaaaggaaacggacgggaggccagcca

SEQ ID NO: 257918 - RNA, 54 nt, Homo sapiens
caacccaagaaaacccgaggagcgcagggagaagaaacgaacggaacgaggaga

SEQ ID NO: 257919 - RNA, 76 nt, Homo sapiens
accagaacagcggcccaaaagaaaggcagacgagaagggacgcagggaggggaagacccagcacagacagagacac

SEQ ID NO: 257920 - RNA, 45 nt, Homo sapiens
cagaacacagggacaggacaagaaaaaggagcagcacgccaaaca

SEQ ID NO: 257921 - RNA, 77 nt, Homo sapiens
aacagcgccgcgccagagagcccacgaacggcgggaacagaaagccagaggccggagagcgcagacacagaccggag

SEQ ID NO: 257922 - RNA, 79 nt, Homo sapiens
aacagaccagcaggacagacagcggcaggacagcacccaaaggcagcggcaaggaaacaagacaaaagaaggagaaaga

SEQ ID NO: 257923 - RNA, 82 nt, Homo sapiens
agacacccagggagaggaaacgggaacagaaagaaaagccgaaagagcggggcaaagagaaccaggagaccccaccaccaca

SEQ ID NO: 257924 - RNA, 36 nt, Homo sapiens
cgagcagccagcccaagcagaaacccacgagcgaac

SEQ ID NO: 257925 - RNA, 74 nt, Homo sapiens
gaacacgggagacacacacaaacgggcaaggccagagaaggcgggagaaagacacgaaccacagaacgcaacag

SEQ ID NO: 257926 - RNA, 73 nt, Homo sapiens
cgcgaaaagcggcccggaccgaaggcgcaagagggaggcgcacacacagagcccaaaaggcagagcgaggaga

SEQ ID NO: 257927 - RNA, 82 nt, Homo sapiens
gaggaaaggggagcgcagcggcgggcggcggcggcggcggcagcggcagcgcggcggggccggccacagagacccggaggga

SEQ ID NO: 257928 - RNA, 65 nt, Homo sapiens
aagcacggaacggggccgagccacgaaagccaacgggacgcagggggacggaagcggcagcgggc

SEQ ID NO: 257929 - RNA, 69 nt, Homo sapiens
gaggacacgggagagccgaaccagaagagaaagggcacagagcagaggacaccacaggaaggaggcgca

SEQ ID NO: 257930 - RNA, 61 nt, Homo sapiens
agcccgcagacaaggggcagcacgccgaaggagagaccagacaacaggccagggaagggaa

SEQ ID NO: 257931 - RNA, 60 nt, Homo sapiens
ccagggaagcagccgaccagccgcggagccgggggcagacaacgaagagaggaaagaagc

SEQ ID NO: 257932 - RNA, 67 nt, Homo sapiens
acgacaaccagccgcaagcagcccccagaacggaagacgaggacagagcccagggacagccaaacag

SEQ ID NO: 257933 - RNA, 84 nt, Homo sapiens
gcgcaccggaagcaccagcgaggaagcaaacaagcagaggaagcagcaaacaaaggcaggaagaaacacaacaacaaaaagagc

SEQ ID NO: 257934 - RNA, 93 nt, Homo sapiens
gccagcagcaaaaacggagcagaaaggaggccagcaagggcacccgaccgacccccagggacagagaagaaaggacccccgagagaagacgaa

SEQ ID NO: 257935 - RNA, 71 nt, Homo sapiens
ggagagcgcgcccagcccgcaaggggcggacaggcaagcagcaggagcagcgaaggggccaaaaacgccca

SEQ ID NO: 257936 - RNA, 74 nt, Homo sapiens
ccggcagacccacagacaagcacgccaagcaaaggaccaacgggaaaaagaagcaacacagcaaaccaggaggg

SEQ ID NO: 257937 - RNA, 70 nt, Homo sapiens
gaagaaagaaagaagcgaggcagacagaagagaagaccgaagaccgaccacgaggcgggggcggaagagg

SEQ ID NO: 257938 - RNA, 78 nt, Homo sapiens
ccaaccccgcgggacagccccagccgagggcggagaaggaacagggagagaaacaacgggaacagaaaggagcgggca

SEQ ID NO: 257939 - RNA, 78 nt, Homo sapiens
cccccacacgccggggcagcacccccacccaggaccgccacccagcaggcacaagaacaaccgaacccacaggaagcg

SEQ ID NO: 257940 - RNA, 83 nt, Homo sapiens
gaagcgcaacccgacccggaggcgcgaggggcccgggggcaggaagcccagagcgcggcgcaggccgcaagcagccggcggcc

SEQ ID NO: 257941 - RNA, 75 nt, Homo sapiens
cggccggaccgccacgccccgcaggaccgacccccaaaccggaccaagagcagagacccacagacccgacgcaaa

SEQ ID NO: 257942 - RNA, 73 nt, Homo sapiens
ggaagccaaggagacaggaacagggcgccccagccacccccgccccagacgagagcgacaaacccagccaggg

SEQ ID NO: 257943 - RNA, 79 nt, Homo sapiens
agggaggcgcaggagccggcagagggggagcagcggaggaagccacaggacgccggggaccgacaggccacaggaccca

SEQ ID NO: 257944 - RNA, 70 nt, Homo sapiens
agacaccagaaagcaccagcccgcgcccggccaccacggcccgggcgcccaccggagaccaccacggagc

SEQ ID NO: 257945 - RNA, 72 nt, Homo sapiens
cgcgcccgccgcgggagagaggacccccccccccccccaagcaacaggcaaccagccaaggaaccccaccgc

SEQ ID NO: 257946 - RNA, 67 nt, Homo sapiens
agaccacaggaggcaacaaagccgcccaacagaaccgcaccaaacaggaacccaccagacaacaagc

SEQ ID NO: 257947 - RNA, 79 nt, Homo sapiens
ccaccacagaccgggccgcggagcccgagacaggggaccacaggagcgggcggggcagccagcccgcgggggcgacccc

SEQ ID NO: 257948 - RNA, 60 nt, Homo sapiens
ggaaacgcgcccgccgcgggcccggcaggaggcacacagagaaaaaaagggaacaaaaca

SEQ ID NO: 257949 - RNA, 73 nt, Homo sapiens
gaagagagcagccagaggagggccggaccggcggggcccgggcaagaaccggaaccagaaaaaagcacggccg

SEQ ID NO: 257950 - RNA, 72 nt, Homo sapiens
gcggcggcagcgccaccaccccgcgccagggagcgccgcggcggagcggggggaacagcaaggccaggacgg

SEQ ID NO: 257951 - RNA, 84 nt, Homo sapiens
gccagaaacggacaagacaaggccaccggcccggcgcaccagcgcacacgccgccacggcgcgagaggaaacgccaagagcgag

SEQ ID NO: 257952 - RNA, 72 nt, Homo sapiens
aaagaaggaacaggagccaaacccaggaggagacgagagccgcggcgacggacggccgcaccaggagccgcc

SEQ ID NO: 257953 - RNA, 79 nt, Homo sapiens
agaagacaaaacaggcagaaaacaagccgaaaggaacaacggaaagccagagcgaaaaaaagaaacacgcaaaacggcg

SEQ ID NO: 257954 - RNA, 59 nt, Homo sapiens
gagaaggaccaagaaccaggaagcgagcagcgcaaagcacaaagaacgcacaccaccag

SEQ ID NO: 257955 - RNA, 72 nt, Homo sapiens
cgcaccaccagcaacaacgccagccagcagcaaggaaggcaggaagccagcacaacagacacccggccagac

SEQ ID NO: 257956 - RNA, 68 nt, Homo sapiens
agggaaagccaagcgaagacaaagcgacccgcccaccgccgcaaggaaaggggaaacaaaacaagcaa

SEQ ID NO: 257957 - RNA, 109 nt, Homo sapiens
cacagaacaacagaagaggagagaggaacccgaagaagaaaggacgacagccagagagggaaacccaaagaacgaaggggagaacccccgccacaggcagccaacgcaa

SEQ ID NO: 257958 - RNA, 35 nt, Homo sapiens
cgacgggggacacaggacaagggacaagaaggggc

SEQ ID NO: 257959 - RNA, 91 nt, Homo sapiens
ggagaaacgcagccagacaggcaggcaaaaacaggagaccgcggccgaccagagaacagcccaggcacaggaaaacaagcccgggaccaga

SEQ ID NO: 257960 - RNA, 55 nt, Homo sapiens
gcgcggaccacccccacgaacgaggggagacgagggccaccgcaccgagcagagg

SEQ ID NO: 257961 - RNA, 80 nt, Homo sapiens
gaggaaaggaaacacggccgcccgagccgcaccaggcggcggaagccccgcccaccaggccaacaaggacccaaggacag

SEQ ID NO: 257962 - RNA, 70 nt, Homo sapiens
aaacagagcccagggacacgaagagagaacacagagaacccagaggaaagagcgaacaaagaagaaagaa

SEQ ID NO: 257963 - RNA, 79 nt, Homo sapiens
ggaaccgccagaaggcaaagcagccaccaggagccacgcggggacgcgccaggggaaccaagaccaggacaaagaagac

SEQ ID NO: 257964 - RNA, 73 nt, Homo sapiens
gcgccgcccagcgcagcccccgaacgcggcccgcacaggggagagcggaagagacagcccaaagccaagaaca

SEQ ID NO: 257965 - RNA, 76 nt, Homo sapiens
ggcggcggcacagccacaccgcaccgcaggccgccccgaccgccgaacaaggggcaccacccagggcagagaaaac

SEQ ID NO: 257966 - RNA, 58 nt, Homo sapiens
ccggagcagcccaaagcagaagccgagaacaccagaccgagcaggaggacgaccagga

SEQ ID NO: 257967 - RNA, 95 nt, Homo sapiens
acgagggaggacagcaaaaaccagggcccacagaggagggcggggccccgagcagacagcaggaaagaagaagccccggacacccagggccaggc

SEQ ID NO: 257968 - RNA, 77 nt, Homo sapiens
cgcagggagcggccggccccaggagcccagcaacagcacccagagcccacgcaaccccccacgccagccaggagccc

SEQ ID NO: 257969 - RNA, 69 nt, Homo sapiens
cagaaacccgccccgagaagcccacaaacaagaggggcgaggaggcgggccaggaaaggagggaaaacc

SEQ ID NO: 257970 - RNA, 60 nt, Homo sapiens
cccagacaagcagcggcacgaggcagagaccagcagcgaaaagaaaggcacaacagaacg

SEQ ID NO: 257971 - RNA, 75 nt, Homo sapiens
cgcagggcgcccggcaagaccaagcaaggaaccagcgagcaaacgcaaacacaacagaaaaaagaaaacacgacc

SEQ ID NO: 257972 - RNA, 62 nt, Homo sapiens
cagcgggaggccagaggaaggggggacaggagccaggccaagagaaagaaacacagaagcga

SEQ ID NO: 257973 - RNA, 59 nt, Homo sapiens
ccgggaagcgggccggcagcgcccggacgaggaggagagagagagagagaggaagcgaa

SEQ ID NO: 257974 - RNA, 103 nt, Homo sapiens
ggaccgccggggggcacagccgccccagccccggcgcagacaggacccccgcgagccaccagaacgagacagcccccaaagggcaacgacaggggaaccccag

SEQ ID NO: 257975 - RNA, 73 nt, Homo sapiens
gacccacgacggcaggaaaggaggccaggacggagagggagaaggagaggggcgggagccgagagaagccaac

SEQ ID NO: 257976 - RNA, 72 nt, Homo sapiens
cggccggggaggggagcgcgaccagagaccgccggggcggcacacggagcacagggcaaggaggagccccgg

SEQ ID NO: 257977 - RNA, 53 nt, Homo sapiens
gaaaaagcgcccgagacgggcccgccgaaaggcacaggcaggacgaccgggaa

SEQ ID NO: 257978 - RNA, 69 nt, Homo sapiens
ggcagcaaaaggggaaaaacaaagaggcacgggaccagaaagcgggaaaaagacccgaagggcgaagac

SEQ ID NO: 257979 - RNA, 74 nt, Homo sapiens
gacgagcggaggacacccaacccgggcaccagacccggaggagcagcaccccggcaggcagaccagccggcccc

SEQ ID NO: 257980 - RNA, 81 nt, Homo sapiens
acaggagaaccccgcccaggaggcaaaaagacagaagagggacaagccaagaaacccggaacgaggaaaacacggaggaca

SEQ ID NO: 257981 - RNA, 76 nt, Homo sapiens
cggcacacccagaacaccaggagcccccaccgagaccaccggaagccaggacccgagggcccaccccgacacccca

SEQ ID NO: 257982 - RNA, 61 nt, Homo sapiens
caccagcagccaccaggagcccgagagagaagggcgcccagacgagcccaccacggaccac

SEQ ID NO: 257983 - RNA, 118 nt, Homo sapiens
aagcggagacacgggaagcacgcgaggcgcccggagccggaaagccgggcgggagcccccggccaggccgggaacggcagacgcagcagagagaccaccagcgagcgcaggccgggaa

SEQ ID NO: 257984 - RNA, 78 nt, Homo sapiens
gcagcaccccgagggagcagacacaccccagaaggcacaggggcaggaggcaccagccggaaaccagcaggggagcag

SEQ ID NO: 257985 - RNA, 82 nt, Homo sapiens
gggccgacccgggccggaccgaccccaggcggcgaggccgccaagaacgagcaggacaaaaacaccgaaccagaagcgagga

SEQ ID NO: 257986 - RNA, 72 nt, Homo sapiens
ggaccagaaaccaggagccacggacaagaccaaaagacagaggcacaaaaggagaaagcagaagaaacagga

SEQ ID NO: 257987 - RNA, 88 nt, Homo sapiens
gaggaagaggcggcggcgaaaggaacggcgaaggcccacgggagaaaaccgggcgcaaggccgcagaccaacgacaacaagacaacgg

SEQ ID NO: 257988 - RNA, 83 nt, Homo sapiens
ccgagagcccaccggcaaacgggccgcaacaaacacagccaccaaaaccccaacaggggcaccgagcacggaggcgcagacgc

SEQ ID NO: 257989 - RNA, 55 nt, Homo sapiens
gacaacgcggagcggcgaagagcaaccaggggacgcgccacagacgggggaaccc

SEQ ID NO: 257990 - RNA, 67 nt, Homo sapiens
cccagccgcgcccgggagagcaagcggaggagcggacaacccagagagaaacgccagaccacagcgg

SEQ ID NO: 257991 - RNA, 96 nt, Homo sapiens
gcggaagaagcaggaggcaagaaaggggaaccccggagaaaaggccaagaaggcagagcgaccaaagcagggcacccccgaaggacaggcacccgg

SEQ ID NO: 257992 - RNA, 79 nt, Homo sapiens
ggccaggccgccgccgagccgaggaggcaaacgggacacggcgggaccccaccgcagagggacacgagggaccggaaca

SEQ ID NO: 257993 - RNA, 77 nt, Homo sapiens
ccggaaacgacagccagacaacgagacacccgcacggacccgggcgcaggggagacagggggacaaaggacagaaag

SEQ ID NO: 257994 - RNA, 80 nt, Homo sapiens
acgaaggacagaagacaccacagagggacgaaggccgcagcagacagaggggggaaccaggccaccgggccaccgcaacc

SEQ ID NO: 257995 - RNA, 45 nt, Homo sapiens
ggcgcccggcgccggccgagaaggcagaggcggcgcagcaacccg

SEQ ID NO: 257996 - RNA, 83 nt, Homo sapiens
agcgcagccgcggcggagacgcacaggcccgggcaggcgccccaggagccacacgggcagcggggagaaaagaaggacggccc

SEQ ID NO: 257997 - RNA, 70 nt, Homo sapiens
caccagaagcccaggcaggaaccaccaccacagacccagacagaagccaccgcaggaagggaggccagcc

SEQ ID NO: 257998 - RNA, 41 nt, Homo sapiens
gcaagaccagccgggcaacaaggacgcccacccagccccca

SEQ ID NO: 257999 - RNA, 55 nt, Homo sapiens
cgggacggcccaccagccaccccaccgcgcagggaggaccccacgaaaacggacg

SEQ ID NO: 258000 - RNA, 113 nt, Homo sapiens
cacaccaccccgcgccgcccccccacccgagcagagccgccgaggagaaaacacccaggacagggcccgagggcaggacagcaggcaccggcgaagcacagagaggcgcgagg

SEQ ID NO: 258001 - RNA, 81 nt, Homo sapiens
gaaaaagggaaaagcgagcggcaaggaggggaaaacccgcagaaaaggagagccaaaacagaccagcgcagaaaggccaga

SEQ ID NO: 258002 - RNA, 79 nt, Homo sapiens
agcacgggacccagcccaggccgcacggacggggggggggccggaaagagggcgggcccgcacggagcgcggggagaaa

SEQ ID NO: 258003 - RNA, 76 nt, Homo sapiens
ggggcagaagggcacagggaagggaccgccacccgcccggaaacggcgacccgcaccccaggaccgccgcgccgac

SEQ ID NO: 258004 - RNA, 95 nt, Homo sapiens
ggaacggcagccccccccagcaggcgccggcggccgacccaaggaccaggccccgcaaggagcagcagccggcccggcgccagcaggaaaacaga

SEQ ID NO: 258005 - RNA, 75 nt, Homo sapiens
acccaaggacaccccccaaggcaccagccgcgcaaagccccaccgaagaccagagaggggagggacaggggaagc

SEQ ID NO: 258006 - RNA, 70 nt, Homo sapiens
gcggggcagacaagggcaacaaggggggaccagagacccccgaagcccgcgagacccagcaacaaaacgc

SEQ ID NO: 258007 - RNA, 68 nt, Homo sapiens
cggccagaagaaaacgaggggcggaacacccgccaaagcagagaaaacccagaaaccccgaaggccac

SEQ ID NO: 258008 - RNA, 73 nt, Homo sapiens
caggcagaaccggcacagccaagaaggcccggaggcgcccgcgggccagcgcgccgacggggacgggacgggc

SEQ ID NO: 258009 - RNA, 78 nt, Homo sapiens
ggaaagccaagaaccaacccagcagccaaaaaaaaagacagaaagaacaggcgacaaacgggccacaaagcacggaac

SEQ ID NO: 258010 - RNA, 70 nt, Homo sapiens
agccaaacggagacagaacccaggagcccccgcagggccccggagcccacacggagcagcccgagagccg

SEQ ID NO: 258011 - RNA, 80 nt, Homo sapiens
aaggagcaagagcaagacaccggacaccgagggcccccaaaaggaccaaaacagaccaggaccgcccccaacggcccccg

SEQ ID NO: 258012 - RNA, 74 nt, Homo sapiens
gaacaacagcacgggagaaagcgcccacgcacgaaagcccaggccaaaaagagacgccagaaggagacacaccc

SEQ ID NO: 258013 - RNA, 76 nt, Homo sapiens
gacgaaggggaacgggaaaggaacaacgggcaagaaaggaggaggcaaaccaaagcgacagcaagcaaacagcagg

SEQ ID NO: 258014 - RNA, 76 nt, Homo sapiens
cacccccggcgggcccgaggcggcgagagaggcaggcggagccgaccgggccaggcgggaggaaggcgggcgacac

SEQ ID NO: 258015 - RNA, 72 nt, Homo sapiens
cggaaaggagcgcgcccggcggggagcgcagcgcgggacgaggacgaggagggcacaaccaacggacaaaaa

SEQ ID NO: 258016 - RNA, 71 nt, Homo sapiens
cgcgcagaccggggagggaaagaaaggaaacacaaagaagacaccagaagggccagcaccacgacaacacg

SEQ ID NO: 258017 - RNA, 71 nt, Homo sapiens
acggacccggaaaaccggcccccaacgacaaaagaagagagcaacagcaagaaggaacaagaagaccaaca

SEQ ID NO: 258018 - RNA, 72 nt, Homo sapiens
aaacaacccgccgcagccgcaggaccagagaaggcagaagcgcacaagccccagacaaagcaagaaagacac

SEQ ID NO: 258019 - RNA, 71 nt, Homo sapiens
gaaaaacacgccacacgggcgcaaggaaacagcagaagaaagaagcgacaaaacagccccagcagaaacac

SEQ ID NO: 258020 - RNA, 74 nt, Homo sapiens
aaaacacggaagaagagaagaggaacaaaagaggggcaggaggaacacaacagcagaaaaagagcagaggacag

SEQ ID NO: 258021 - RNA, 70 nt, Homo sapiens
caaggcaaccccgagcgcagccgggaaacacggcggaggaagccagcccgagcaggcccaggggaggagg

SEQ ID NO: 258022 - RNA, 77 nt, Homo sapiens
aggaggcggcccagcggcacgcccacaagccccaaggcgccaccagcaaaaccagagaaacaggcagagaaagacac

SEQ ID NO: 258023 - RNA, 86 nt, Homo sapiens
cccgccccccagccgaccggaagagaccggggccccccagccccgccaacccagaggcacagggccaggcacacaacgagaccacg

SEQ ID NO: 258024 - RNA, 76 nt, Homo sapiens
ccggcccgcaccaagagaagagagagccaggcacaaaaaggggaagacaaaagcagacccaaccaaggaaaggcac

SEQ ID NO: 258025 - RNA, 63 nt, Homo sapiens
agcgagcggaggagcaggcgccggaggaagcgcacgcaccaggaaacaccaccgaaccgccgc

SEQ ID NO: 258026 - RNA, 63 nt, Homo sapiens
ccccgcgcgcagagggcagccgggaaagccgcaaaggcgcgaccgcccagggagacggaaccc

SEQ ID NO: 258027 - RNA, 80 nt, Homo sapiens
cgcggcaggagggagcaggagcggaccggcccggaagggcccggccacaggaggggcgccaggccgggccccccgccccg

SEQ ID NO: 258028 - RNA, 53 nt, Homo sapiens
aaaagcgacggaccgcgcaagccccagacgagacacagccagcggcccacccc

SEQ ID NO: 258029 - RNA, 57 nt, Homo sapiens
gcgccacggaccgcgggacaagaaaacagcggccgggagaagcacggaaagcagggg

SEQ ID NO: 258030 - RNA, 76 nt, Homo sapiens
gccgaccgcgcaaacggcgcagaggcgggccgagcggccccgagccgggacacccggcggcggccccggagaaagg

SEQ ID NO: 258031 - RNA, 69 nt, Homo sapiens
gcgagggacaaagaccgaaagggagaagcgcaccaagcgccaggcagccagagccagcagacccaccag

SEQ ID NO: 258032 - RNA, 69 nt, Homo sapiens
aaaaaaagaaagaaaacacaggcggggacggcccgggacccaccaggccacacccagcggaaaagaccg

SEQ ID NO: 258033 - RNA, 62 nt, Homo sapiens
aaaaccaccacaggcacgacgcccgagaaaagggaacaaccccaaaaaaccgacacccggga

SEQ ID NO: 258034 - RNA, 84 nt, Homo sapiens
ccggccgacaagcaagcagcgcgccggccccaacacggaccgggcagagcagagaccaaggagccaggaaggagaagaggggaa

SEQ ID NO: 258035 - RNA, 58 nt, Homo sapiens
cagaagcacaggcccgggcgaaggggccacgcgaggaccgacacaagaagcagccaga

SEQ ID NO: 258036 - RNA, 82 nt, Homo sapiens
cgggacccacgacgccaaagcaggccggcagcggggcaggagaaccgaagcggcacacacaaacacagaaccaagcccgcga

SEQ ID NO: 258037 - RNA, 68 nt, Homo sapiens
aaggagccaaaaaacagaagaaaggaccgaaaaaggcccgagagagacgcagcgcaaggccgggggag

SEQ ID NO: 258038 - RNA, 73 nt, Homo sapiens
gaaggaaaccacagcccacacagggacccaacagaggaccagcaacaacaaagacaaagacaagagcaacacc

SEQ ID NO: 258039 - RNA, 78 nt, Homo sapiens
ccagacacagagcaggaacgcagccggggacaccaaacaggcaaaccgacaccagcgacacaagcgcgagggaaccac

SEQ ID NO: 258040 - RNA, 77 nt, Homo sapiens
gagacaacggaggacagacagagaaggaacagaacagacaccaccgaaacgcgccaagcagacaggcaaggaacaaa

SEQ ID NO: 258041 - RNA, 80 nt, Homo sapiens
agcagcgcgcggagaagaacggggagccagggcgcccccccaccagccgacgaaggaccgcgcggaaccccgcaggagac

SEQ ID NO: 258042 - RNA, 79 nt, Homo sapiens
ggccaggaagcgacggaacaccacagaccggcggcagaaacggacaaggaccagacacgccagggaggagacagcgaaa

SEQ ID NO: 258043 - RNA, 82 nt, Homo sapiens
accacacgccgaccggacaggagcaggcagaggacggggcgaaagacaaagaagcaacacagaaacggaaaaggaaccaccc

SEQ ID NO: 258044 - RNA, 74 nt, Homo sapiens
agcggccgcgcacccccggccggaggcaccagcccgcacaaacacgcagaggcaagaagagaggcaggagggcc

SEQ ID NO: 258045 - RNA, 64 nt, Homo sapiens
agagcaggacaccggaagcgggaaagggggaagaacacggaaaccggacagggacaggaaagaa

SEQ ID NO: 258046 - RNA, 57 nt, Homo sapiens
aaaagagcaccagacaagaacgacagcacccaagaaaacccaggccgcgaaggagaa

SEQ ID NO: 258047 - RNA, 74 nt, Homo sapiens
caagaggacagacaagcagaaaaaggggcgcagcgcgaggagggggcagcggcccaggcaaggccgcaaaagaa

SEQ ID NO: 258048 - RNA, 62 nt, Homo sapiens
gagccagagcaaggggaacgccacggacggggggaagaaacgagcgagcccgggacagcaag

SEQ ID NO: 258049 - RNA, 80 nt, Homo sapiens
caccaacggcaccaaccccagggggcaggagggacagagacgcagaagggccaaccgagagcagagagacaggaagaagc

SEQ ID NO: 258050 - RNA, 69 nt, Homo sapiens
gggcaagggcgcccgcgggcacagcagaagaagcacacaaccacagcagcggggacgggcaaccacggg

SEQ ID NO: 258051 - RNA, 86 nt, Homo sapiens
cacagcagcacagcgagaaagggaccgaccaacgggcagagggagcggccacaagcccaagggccagacagcggcccagggggaga

SEQ ID NO: 258052 - RNA, 112 nt, Homo sapiens
cccacacgaggccacccagcccaccaaacacgccggaaaccccgcccacagcacgaggaacgggcccaaagaacggaaacccaaaggaacgaaaccgccccacagagcccac

SEQ ID NO: 258053 - RNA, 71 nt, Homo sapiens
ggaggacaagccgcggagcagggggagggggccagaacgaagcacaacaggcagcgggaaaaccgacacgg

SEQ ID NO: 258054 - RNA, 79 nt, Homo sapiens
gaaaggagggcagacaaaggaggcaaaagggaaaaaacaggagcacagggcggagaacggaaaagcaccaggaagcaga

SEQ ID NO: 258055 - RNA, 76 nt, Homo sapiens
acaaaggagcacgacggcaggaaggaggagacgaagaaaggaggcccagccccgaggacagcagacaaacaaggac

SEQ ID NO: 258056 - RNA, 30 nt, Homo sapiens
agagcgccaagacgagaaggagggccaccg

SEQ ID NO: 258057 - RNA, 77 nt, Homo sapiens
gacacgggaccacccagggcaaaccccgccagaggcacacacgaccaccacccggaacgccgcacagaccaacagac

SEQ ID NO: 258058 - RNA, 73 nt, Homo sapiens
gagacaagccggaggacgcaaacgacaccccgcagggaccagagcggaagcccacgaggacccgggagccagc

SEQ ID NO: 258059 - RNA, 55 nt, Homo sapiens
gggagagccgcaggcgcccaagcaacagaggggcaaagaaaaaggagagaaaaag

SEQ ID NO: 258060 - RNA, 41 nt, Homo sapiens
agaagaaccggccaggagcgaggaaggagagagccaacaac

SEQ ID NO: 258061 - RNA, 58 nt, Homo sapiens
caaagaaacaaaagacaaccgcccagaaacggccaggacacgggcaaacgaagaaaac

SEQ ID NO: 258062 - RNA, 74 nt, Homo sapiens
caaaccaaacccaggaaagggaccacaccgacagggaaccccgggcagggaccccgccaccacagggccagaag

SEQ ID NO: 258063 - RNA, 75 nt, Homo sapiens
gacaacccaaaacaacggaaaagcaaggacaaggccaggaaagagagcccagcagcacacagacaacgcaaacag

SEQ ID NO: 258064 - RNA, 58 nt, Homo sapiens
caaagaaccacagggacccccgaagacaaggagcaaagaggagccaggaagagacaag

SEQ ID NO: 258065 - RNA, 77 nt, Homo sapiens
cgccccgaagagggggacacgacccggagcacccgaccccgaaaccaaaggcaagaaccggagcaggagaaaagccg

SEQ ID NO: 258066 - RNA, 56 nt, Homo sapiens
acaacaggaaaacaaaagaggagaaagaaggacaggagaaacaggggccaaaaaac

SEQ ID NO: 258067 - RNA, 73 nt, Homo sapiens
cccaagagcgggacacagaccgcacacaaggacacgagccccacacccaccgaggcccgccccccgccaaagg

SEQ ID NO: 258068 - RNA, 81 nt, Homo sapiens
ccgcaccgcgccccccaacacgccgcgcaggaacgggccgacgacaccagcgaaggaagagccaggaaagcaaaagggcac

SEQ ID NO: 258069 - RNA, 80 nt, Homo sapiens
ccgcggcgcagcgacccccgccaggcaaaaggaagggagagcccgaccagagaaaaggcggaagaccgccaaaaaggaca

SEQ ID NO: 258070 - RNA, 81 nt, Homo sapiens
ccaaccggagcagccgagggaaccagagggaacgaaacaagaaggcccaaacaggccaacacaggaagggagcaagaggac

SEQ ID NO: 258071 - RNA, 75 nt, Homo sapiens
cgggggaggcgcgcgacgaagagccccagccccggccgggccgaccggcagcaggggggagcgggaagacccgga

SEQ ID NO: 258072 - RNA, 75 nt, Homo sapiens
gaagggaggagacccgaccccagaagggacgaggacgaggagggcacaaccaacggacaaaaacgcccccgagac

SEQ ID NO: 258073 - RNA, 69 nt, Homo sapiens
cacccgcagagcgaggaccggaagcgcgaaaacaaaaaggggcgcgagagggaaagagaaaaccaacgg

SEQ ID NO: 258074 - RNA, 61 nt, Homo sapiens
aggaggccgaaccccaagagcacggaacaacagccggcgcgaccggagagagcgaccaagc

SEQ ID NO: 258075 - RNA, 75 nt, Homo sapiens
ccgagcccaaaccccgccaccacaagcaagaggaaaggccgccccggaggaagaaaagggagccaagaggcaaaa

SEQ ID NO: 258076 - RNA, 81 nt, Homo sapiens
cgacagaggagagcagagacagacacaagcgggccaacaaaaggcaccgagcccagcagacccgaggaaggccaccgaagg

SEQ ID NO: 258077 - RNA, 78 nt, Homo sapiens
cggagcggcgcagccggagggggccggaggcaaaaggcgagcaaacggaaagagaccaacgggagaggaaggagaacc

SEQ ID NO: 258078 - RNA, 74 nt, Homo sapiens
gcgagcgcggcgagacgccagccacccccaagaggcgaaaacagcgaaaggaaacagacagaaaaacggcgcga

SEQ ID NO: 258079 - RNA, 123 nt, Homo sapiens; identical to SEQ ID NO: 111246

SEQ ID NO: 258080 - RNA, 76 nt, Homo sapiens
ggaccaagaggcgacggcgaggggccgaaaagaaggacccaacaccgccccaagcaccagccgcagaagaacagaa

SEQ ID NO: 258081 - RNA, 119 nt, Homo sapiens; identical to SEQ ID NO: 144652

SEQ ID NO: 258082 - RNA, 74 nt, Homo sapiens
agagaagaaacaccacgcaggagaaaacgggaaacggaaaaagagcgcagaggaaggccagcaaggccagggag

SEQ ID NO: 258083 - RNA, 65 nt, Homo sapiens
gagaagacgcgacaagaagcgccaaaaaggggagaaccaggagagaaccagggggaaggccccgg

SEQ ID NO: 258084 - RNA, 86 nt, Homo sapiens
aggaaacgggaaagaggcgacggcccgcgacggaggccgcggggcggcagaccagggggacaagcccaaccagggaccaggccaaa

SEQ ID NO: 258085 - RNA, 75 nt, Homo sapiens
caccgaagcaaaccaccccgccccgcgcagagcagacagaacagccgcgcggccaagaagaagaggagggggaga

SEQ ID NO: 258086 - RNA, 59 nt, Homo sapiens
cccaagaaacgggcagccaggcccccacagcccgcaggggacacacacgggcgcggagc

SEQ ID NO: 258087 - RNA, 58 nt, Homo sapiens; identical to SEQ ID NO: 70017

SEQ ID NO: 258088 - RNA, 78 nt, Homo sapiens
cacaagcccacaagaaagaagaacgagacagacacagacgacacccgaggaggcgcagacaaagaaggagacacaaac

SEQ ID NO: 258089 - RNA, 37 nt, Homo sapiens
gagaggaaccacaagcagagccaagagaagaggcgga

SEQ ID NO: 258090 - RNA, 73 nt, Homo sapiens
gaagcgcgcgagcccgggagggcggagaggccaagcagcagacacacacgagcaggacgaagggaccgaggcc

SEQ ID NO: 258091 - RNA, 71 nt, Homo sapiens
acccaaaggaaccagagcggaccaccagaaagggacagcgaggaaagccagggaccgagcaccgcagaccg

SEQ ID NO: 258092 - RNA, 73 nt, Homo sapiens; identical to SEQ ID NO: 233301

SEQ ID NO: 258093 - RNA, 81 nt, Homo sapiens
cgacggcagggcgaggcacggggagggacgaaggggccgaccccagcacggcgccaggggcggcggccgcccccgccgcca

SEQ ID NO: 258094 - RNA, 74 nt, Homo sapiens
ggccccagcaccaccaagggcaggcagggccaaagacccagggacaggacgggcaacaggggaaccaaggcaaa

SEQ ID NO: 258095 - RNA, 76 nt, Homo sapiens
gggcgggccgcgcagcccccgccgaaaggcaagacacgcaaaggccggccacaaggacaagacccgaaaggacaag

SEQ ID NO: 258096 - RNA, 66 nt, Homo sapiens; identical to SEQ ID NO: 175886

SEQ ID NO: 258097 - RNA, 39 nt, Homo sapiens; identical to SEQ ID NO: 131623

SEQ ID NO: 258098 - RNA, 51 nt, Homo sapiens
gacgcaggccaaacaaaacgggggggaccaagcagggacgggggagaaagc

SEQ ID NO: 258099 - RNA, 83 nt, Homo sapiens
gcccgggacagccgcgcggcgagaggcgacacagaaagggagaaggccaagcacggagcacacagccaggacccagcccacac

SEQ ID NO: 258100 - RNA, 70 nt, Homo sapiens
aggcgcggccgccccgcgggggacggacaggaaagaggagagaaacgccaaagaaaaaacaaaacaaaca

SEQ ID NO: 258101 - RNA, 64 nt, Homo sapiens
aaggggacaaccggcgaaaggcccccagaccaaggcaacaacggaccaaaaggacgcccgagcg

SEQ ID NO: 258102 - RNA, 77 nt, Homo sapiens
ggcggacagccacgccagggagcacggcacaagaacgccgaacaaacccagcagcagaaacggacaaaagccggacc

SEQ ID NO: 258103 - RNA, 78 nt, Homo sapiens
ccgggagcggcggccacggaggcaccagaagaagcaccagaagggagaaccacaagggcgagccaagaagagcgacgc

SEQ ID NO: 258104 - RNA, 79 nt, Homo sapiens
gccagccaccggggccgccgcgccgccggacgacaccccacagcaaaaggggagcaagaagaaagagcagggaggaggg

SEQ ID NO: 258105 - RNA, 78 nt, Homo sapiens
ggacggccccggaacccagagacgcacagagccacgcgagagcagagaggcagaacgaaaaacaggcggcgagagagg

SEQ ID NO: 258106 - RNA, 77 nt, Homo sapiens
cgccacccgcgagcccaccgccaagacggaaaccaggacagcgcacagaggagggagaagccgcgcagcccaagccg

SEQ ID NO: 258107 - RNA, 73 nt, Homo sapiens
gaagacaaccacagaggcacgccaacaggacacacagaaagaccaacacagagggccggaaacggaccaagca

SEQ ID NO: 258108 - RNA, 76 nt, Homo sapiens
ggaagcgccggggaacgcagaggcccacagaacagagaaaaggaaggcggcggaagcagcagaagaagagagggaa

SEQ ID NO: 258109 - RNA, 85 nt, Homo sapiens
ggcagcgacggcagcggcggcggcggacaaacaggcaccgcagggggaaacaaacaaagaaaggacacaggaacaaagaggccca

SEQ ID NO: 258110 - RNA, 86 nt, Homo sapiens
cagcaggggcgccccggacgagagcccggcgggggcgcaggcagccagacaggccaggacagcggaggccaccacccaaaagaggc

SEQ ID NO: 258111 - RNA, 71 nt, Homo sapiens
gacggcgaagccccagaaaggcgagagaaacgcagcaccagaaaggcggggacccagccgaccgaagccac

SEQ ID NO: 258112 - RNA, 78 nt, Homo sapiens
cagagcgcggaacccaagaccacagccccaggaaaagcagaacagccgcggcccaagaacggacgcacacagaggcaa

SEQ ID NO: 258113 - RNA, 61 nt, Homo sapiens
gaacggaaggcacagggagccaaggaaaaggaaaccagaagagggacgaagaaaacagcgc

SEQ ID NO: 258114 - RNA, 73 nt, Homo sapiens
gcgagcgggagcacccacgccggggacaagccggcaacacacggaagggccgaggccaagccaggacggaggg

SEQ ID NO: 258115 - RNA, 70 nt, Homo sapiens
ggcgaagaagggaaacgaggaagaggccaaaagggaaggaggaccacccccacgaagagcaagggacggc

SEQ ID NO: 258116 - RNA, 75 nt, Homo sapiens
ggcagaaggcaccaaaggcagaaccccacaaggacaacgaggcaacgcagacccagcccaaaagaaaccagggac

SEQ ID NO: 258117 - RNA, 76 nt, Homo sapiens
cacagcaagggacaggaaggaacacacggagcagcaagagccccgacagcagccaagaccccccgaccggccagac

SEQ ID NO: 258118 - RNA, 82 nt, Homo sapiens
cagagacaggccggggagcacagagaaggggggaacacaggcgcagaacgccggcaggaaaggagacacaaagccacacccg

SEQ ID NO: 258119 - RNA, 65 nt, Homo sapiens
agaagagaagggaagggggggaagaccccaggcgaccacaccagacacagacaacgaaaaggacc

SEQ ID NO: 258120 - RNA, 43 nt, Homo sapiens
caccggcccgcacgccggcacagcggcggcccccaccacggcc

SEQ ID NO: 258121 - RNA, 62 nt, Homo sapiens
acccgggccgaaggaagaccgaccacacgccacagcacggcggaagggggaagagccgggag

SEQ ID NO: 258122 - RNA, 59 nt, Homo sapiens
ggcgcgcgcaagcacgcgaggagggcagcgacggaccgagagggacgaggccagaagca

SEQ ID NO: 258123 - RNA, 73 nt, Homo sapiens
caagaaagggacccgaacacacgcaggaggggaagagaacgagacaaacaggaaaaagaggccacagaaggcc

SEQ ID NO: 258124 - RNA, 71 nt, Homo sapiens
ccagagacccgcagaggagcccaccggcacgagcaagcggccggaaaggggcgggcagcaggaggaggacc

SEQ ID NO: 258125 - RNA, 83 nt, Homo sapiens
aacccacacagcgcccagcgggcacgagaaaaaagggcagggaaagaccaaaccccaaagcaggccaaacccaggaggacaac

SEQ ID NO: 258126 - RNA, 119 nt, Homo sapiens; identical to SEQ ID NO: 41698

SEQ ID NO: 258127 - RNA, 76 nt, Homo sapiens
aaaacgaggaccaccgaggaggagcgcagagcggggcgcaagaagaggccggaagcgagaggaaaagccagcaacg

SEQ ID NO: 258128 - RNA, 83 nt, Homo sapiens
gcagcgaacaaggagaaagccacaacagggcggcaacaggggcgagaaagggggccacaacacggacaccagccgaaagccgg

SEQ ID NO: 258129 - RNA, 83 nt, Homo sapiens
gcggggcgcgggccgcacccgcgcggagcacagaccagcgcgcgaccggagccccacagcggcacaggccccagccaagcccg

SEQ ID NO: 258130 - RNA, 71 nt, Homo sapiens
ccagaggggagacccccgggggaagaagggggccaacaccacaggacagcccaggccaagacagcagccac

SEQ ID NO: 258131 - RNA, 78 nt, Homo sapiens
cagacccagcccccgggcagaccggaaaggccaagcggacgggcagccggggcagaccccccccacggcacccccgca

SEQ ID NO: 258132 - RNA, 75 nt, Homo sapiens
gaaaacaccagccaggcagaccgaaaacccaagggagcaccccagagcagggaaaaggggcgaggccggccgacc

SEQ ID NO: 258133 - RNA, 53 nt, Homo sapiens
ggacggaaccgccgagccagaggaggagcgaccaggcggagaggcagggcgaa

SEQ ID NO: 258134 - RNA, 77 nt, Homo sapiens
ggggccccaccgccccaggcagcggccacaccaccagagcgaaccccaggcacccagaccaaagaaaagaagacaac

SEQ ID NO: 258135 - RNA, 81 nt, Homo sapiens
gcaacagcacgccacacaaggggagccgaaggccccaaagcgggaaagcgcaaaggaccagagaaagaggaaagacaagcg

SEQ ID NO: 258136 - RNA, 80 nt, Homo sapiens
ccgcggggcggcgcgccgccgaaggcgggcgcagcggcggagcggagcggagcccggaggcaggagcacaaaggaacgga

SEQ ID NO: 258137 - RNA, 78 nt, Homo sapiens
ggacgaaagcgaaagagaagcggagaagggcagaagggagaagagccaaggagaccaaacccagcagcaccgcagcag

SEQ ID NO: 258138 - RNA, 36 nt, Homo sapiens
ccccacgaaagaacagcgagcccgccaaaaaacagc

SEQ ID NO: 258139 - RNA, 40 nt, Homo sapiens; identical to SEQ ID NO: 167787

SEQ ID NO: 258140 - RNA, 83 nt, Homo sapiens
cagccgccgcccacaaggaccggagagcagcaaacgaaagagagacagggggaccagacagaagaagaaaacagcacacagaa

SEQ ID NO: 258141 - RNA, 50 nt, Homo sapiens
ccccggcgggacgagacaagacaacgcacggcagcccacgaacgagcggc

SEQ ID NO: 258142 - RNA, 45 nt, Homo sapiens
gcagcacacccccggacagcaagaacaagagggaccagggagagg

SEQ ID NO: 258143 - RNA, 67 nt, Homo sapiens
caaccacacagccaaaaaccacgccaaaaaaagggccgcggaacaaaaaggggcgcagcgaagcaac

SEQ ID NO: 258144 - RNA, 74 nt, Homo sapiens
cacaacggcaagggagcccaccagaaacacagccagacacgaaggaggccgagaagaaaggggcggccccggac

SEQ ID NO: 258145 - RNA, 72 nt, Homo sapiens
cggaaaaccccccccggccaaggggggaggacccgggcgcgcacgccagaacgccaccgggagccaaagggc

SEQ ID NO: 258146 - RNA, 85 nt, Homo sapiens; identical to SEQ ID NO: 200159

SEQ ID NO: 258147 - RNA, 83 nt, Homo sapiens; identical to SEQ ID NO: 102288

SEQ ID NO: 258148 - RNA, 93 nt, Homo sapiens; identical to SEQ ID NO: 55040

SEQ ID NO: 258149 - RNA, 38 nt, Homo sapiens
accaacagggaacgagaaacagccacaaagccagacag

SEQ ID NO: 258150 - RNA, 78 nt, Homo sapiens
caagacgggcccaccgagcagccgcagacccgaagagaggccagagacgggccagcagccacccacaagagagaggac

SEQ ID NO: 258151 - RNA, 76 nt, Homo sapiens
cagacccgacacagggccacaggggggccacagcggccccccaacgccaggggaaagagggaccagcgcagcagaa

SEQ ID NO: 258152 - RNA, 72 nt, Homo sapiens
gcagacccggagcccaagggcaccaaagcgaagccaccccacgcagcgcagcgccgcagagacaggcgcccc

SEQ ID NO: 258153 - RNA, 131 nt, Homo sapiens
gagcgccccaagcccaacgccaggccagggcgcgcaccggcacaagaggagcgggagcgcaagcggcaggccagcagcaagccggacaacgggacccccccaggccacgggggcgcagagcggaccgaccc

SEQ ID NO: 258154 - RNA, 99 nt, Homo sapiens
cggagacgagagccaagaggaaaaacgcaagaagcgcacagccgcaaaacgccacaaaccccgggccccaccagccgcaccagaaagagagagaagacc

SEQ ID NO: 258155 - RNA, 52 nt, Homo sapiens
gcaaaacccggaccccccagaaggcgaagacacggaccagggcagagcagca

SEQ ID NO: 258156 - RNA, 106 nt, Homo sapiens
agaaagaccaacagaaacgaggacaaggaccgccgggcaagacccaagccacaaagggcggaaggcgaccgaccggaagcggaggacacagggcagcaggacacca

SEQ ID NO: 258157 - RNA, 78 nt, Homo sapiens
ggaacccagacagcgcgaagcacagagggaaggagaaggagacacagaaggagcagcaggagacagccagccgaccca

SEQ ID NO: 258158 - RNA, 39 nt, Homo sapiens
gaaaggcgggaaggcaccaagccccacagagaccaccac

SEQ ID NO: 258159 - RNA, 88 nt, Homo sapiens
ggcggcccgccggccggcgcggcgcagaagaaacccgcggcgaccacagccaaagcgggccggccaggcggaggcaggcggacccggc

SEQ ID NO: 258160 - RNA, 67 nt, Homo sapiens; identical to SEQ ID NO: 203006

SEQ ID NO: 258161 - RNA, 77 nt, Homo sapiens
gagaacagaaggagaagaagaggaaccaaagagcccccacaagcccaaaggggaagggcaggcgcccagccaaagag

SEQ ID NO: 258162 - RNA, 53 nt, Homo sapiens
agggaagaagccggagccgccgcaagccacacgaagagaacgcgccgccagac

SEQ ID NO: 258163 - RNA, 70 nt, Homo sapiens
ggccacagggaagggcggcggcccaccggggaccgaggccggggggagccgcagaagcacacacgcacac

SEQ ID NO: 258164 - RNA, 71 nt, Homo sapiens
gccacccccagcgccgaaaaaaaaggcgcaaggaagaaccaacaccaaagaaacagcccgcacaggacaaa

SEQ ID NO: 258165 - RNA, 81 nt, Homo sapiens
gaggggagaggccggaggacaccaacaggaagaagccaagaggagaaagaagcgacacccacacgaaggcccacagggaca

SEQ ID NO: 258166 - RNA, 98 nt, Homo sapiens; identical to SEQ ID NO: 116370

SEQ ID NO: 258167 - RNA, 76 nt, Homo sapiens; identical to SEQ ID NO: 220031

SEQ ID NO: 258168 - RNA, 93 nt, Homo sapiens; identical to SEQ ID NO: 229310

SEQ ID NO: 258169 - RNA, 38 nt, Homo sapiens
gacacgagcacaaacggagcccacccccccccgccgga

SEQ ID NO: 258170 - RNA, 73 nt, Homo sapiens
gccacaaagcacgaaacaccacagcgcagggaaaacaggggagagcacagacagcgggaccaaagagcccgac

SEQ ID NO: 258171 - RNA, 78 nt, Homo sapiens
aagaaagaacaggcacagggaagcccaaacacagaaaaacaggggacacggcacaggagggcaagaaccccagaggag

SEQ ID NO: 258172 - RNA, 77 nt, Homo sapiens
gccacggacccggcgacaacacccggccccgagacagaagccgaacacccaccggcccgcaagaaacacagaagcag

SEQ ID NO: 258173 - RNA, 80 nt, Homo sapiens; identical to SEQ ID NO: 112328

SEQ ID NO: 258174 - RNA, 36 nt, Homo sapiens
ggggcgaaccgagcaccagcgcccccacgagaaggg

SEQ ID NO: 258175 - RNA, 87 nt, Homo sapiens
caaggccgagcggaggcgacccagccagaggcccagaggaagacggggcccaaagaggaagggggaaaggaccaaaaaaaaggaccc

SEQ ID NO: 258176 - RNA, 47 nt, Homo sapiens
agccagagcgcggcccaggaggagagcggaccccgagcaggcagaaa

SEQ ID NO: 258177 - RNA, 75 nt, Homo sapiens; identical to SEQ ID NO: 207896

SEQ ID NO: 258178 - RNA, 72 nt, Homo sapiens
acccggggcccgagccggagccgagcgcgccgggggacacgggacccaggccacgggccggggcccccaccg

SEQ ID NO: 258179 - RNA, 75 nt, Homo sapiens
gagcgcgaacagcagaccgaaagccggcggagaggaccggagcggaaaacccgaagcgaagcaacaaaccaccac

SEQ ID NO: 258180 - RNA, 51 nt, Homo sapiens
agcacgccggcccagcccaaacgggcagcgaaggggagaaaacgggccgga

SEQ ID NO: 258181 - RNA, 63 nt, Homo sapiens
aaccacgccgagaagcagacaagcaagcaccccacgaagcgggggacgggagcggaaccgaca

SEQ ID NO: 258182 - RNA, 69 nt, Homo sapiens; identical to SEQ ID NO: 181020

SEQ ID NO: 258183 - RNA, 80 nt, Homo sapiens
cgcgcacgcggcgcgccggcaaagcgagcccgaccagacacacggacacgaaagcgcagcgaccgaggaccggggggacc

SEQ ID NO: 258184 - RNA, 38 nt, Homo sapiens
gccaagcagggggcaaggacaccagaagaggccccgga

SEQ ID NO: 258185 - RNA, 88 nt, Homo sapiens
gagcgcaacaccccgagccagcgagccagcgagccgccgacccgccgagcaaaagggccaaaaagcagaaaaacaaaccagcccaaga

SEQ ID NO: 258186 - RNA, 129 nt, Homo sapiens; identical to SEQ ID NO: 132788

SEQ ID NO: 258187 - RNA, 52 nt, Homo sapiens
ggaagcacgagcacgccaccggcgccagcgggcgagggcgaaaccgccaagc

SEQ ID NO: 258188 - RNA, 65 nt, Homo sapiens; identical to SEQ ID NO: 105401

SEQ ID NO: 258189 - RNA, 80 nt, Homo sapiens; identical to SEQ ID NO: 65083

SEQ ID NO: 258190 - RNA, 74 nt, Homo sapiens; identical to SEQ ID NO: 65086

SEQ ID NO: 258191 - RNA, 75 nt, Homo sapiens
caaccagggggcaagaagaaggaggggaaccggagagccagaagaaaagagggcagaaacaggcgaccacaaagc

SEQ ID NO: 258192 - RNA, 76 nt, Homo sapiens
ggaaaaaccggagaagagaaacaaaaggacagagaaaaggcccaggcaaagaaaagcgccagggggggacacaacg

SEQ ID NO: 258193 - RNA, 80 nt, Homo sapiens
cgggccgcgccgcgccgccgcccacaagcggcgccgcgccccggccgcacggcggaaccacagaagaagaagaaaacaaa

SEQ ID NO: 258194 - RNA, 79 nt, Homo sapiens
ggacacacaaccgagcagcacgcagcagagcgaaaaaaaccgggggagacccgccacggaacagaggaaaccagccccg

SEQ ID NO: 258195 - RNA, 54 nt, Homo sapiens
acaacggccacccgagaggaccgcaagaaggaagcagccaccccgccaggcccc

SEQ ID NO: 258196 - RNA, 70 nt, Homo sapiens
gaggacaaagggagaaggcagagacgaagcgaccggacagaagacagaccgacagacgccaaaccacccg

SEQ ID NO: 258197 - RNA, 80 nt, Homo sapiens
ggagcgcgcggacgccaaccagcccgcgagcgcccgagagcacgcagccgggggaggccacagcgagccaccagcccgcc

SEQ ID NO: 258198 - RNA, 83 nt, Homo sapiens; identical to SEQ ID NO: 146761

SEQ ID NO: 258199 - RNA, 70 nt, Homo sapiens; identical to SEQ ID NO: 222090

SEQ ID NO: 258200 - RNA, 95 nt, Homo sapiens; identical to SEQ ID NO: 24575

SEQ ID NO: 258201 - RNA, 84 nt, Homo sapiens; identical to SEQ ID NO: 63151

SEQ ID NO: 258202 - RNA, 80 nt, Homo sapiens
accaacgcaagcagggagaagacggacgaaccacccacaaccaagaggcacaagagagaaaccagcgcaaagagcccgaa

SEQ ID NO: 258203 - RNA, 80 nt, Homo sapiens
ccggaggacgcggagcccaagaaacgggcagccaggcccccacagcccgcagagcaaaagagacggaaaaggacacacgc

SEQ ID NO: 258204 - RNA, 96 nt, Homo sapiens
ggcgcggaggcccgaagacgccgaggaggcagagcaccgcggcgccgagcgcagacccgagaggaggaagagacacgaaggaggaaacgacaccca

SEQ ID NO: 258205 - RNA, 85 nt, Homo sapiens
gccaaagccccaccaagacacggaccacgaggacggaagagcacgacgcgcgggccggagccccacaagccagagacgcacggaa

SEQ ID NO: 258206 - RNA, 72 nt, Homo sapiens
aaccccggccaaggaggggcaaaaacccggccaggagcccgccgcccgcagccaaccgccgggacgacggcg

SEQ ID NO: 258207 - RNA, 96 nt, Homo sapiens
ggcccaaaccgacaaagaggcacggacaaaccagggaacaccaggagggaccgaggaagaccagagagcggccacaggacccgacgccagacaaca

SEQ ID NO: 258208 - RNA, 69 nt, Homo sapiens; identical to SEQ ID NO: 77183

SEQ ID NO: 258209 - RNA, 46 nt, Homo sapiens
ccaccggcggcccagaaagcaggacacaccggacagacccggggcc

SEQ ID NO: 258210 - RNA, 74 nt, Homo sapiens
gcacggaagcccaggcacgaccacccgccaccagacaccagcgcaccacgacaaagaagagaaaacgcggcaga

SEQ ID NO: 258211 - RNA, 63 nt, Homo sapiens
cgcgcggaggagaagagacccggggaggcagaggcggccccaggggggaccaacaagggagaa

SEQ ID NO: 258212 - RNA, 69 nt, Homo sapiens
cgaaaccggggagagcagacacggaaccggggcgcaagacaccaaaaggaagcgggcacaaaaaaaagc

SEQ ID NO: 258213 - RNA, 81 nt, Homo sapiens
cacccggggagaagccaaggagcgcgcccaagcacacgggccaggccacgcgcgcagccggacgcaggaagagaagaacca

SEQ ID NO: 258214 - RNA, 68 nt, Homo sapiens
gagaagaaaaacccccacacagagcaacccgcagacacagaagcaggggaagcccgggaaggagacga

SEQ ID NO: 258215 - RNA, 74 nt, Homo sapiens
aaaaaagagagaaaaggccaaagagagggcgaacaagcaagggccgagaagaagcggggacggcaaaacagcca

SEQ ID NO: 258216 - RNA, 82 nt, Homo sapiens
caccgagcagggccaagcgaaggccccagcaggaccccgccccccccggcgccagagagaaccgagccaccgcaacggaggc

SEQ ID NO: 258217 - RNA, 38 nt, Homo sapiens
ccacacgcgcaaagcccgagaaccgaccacaccgggac

SEQ ID NO: 258218 - RNA, 105 nt, Homo sapiens
aggaggaagggcaggacgagggcggcgcgggagcagcacccacagccaaggcgggagccacggagcggccgccagcgaggccacgcggccaccagaccgaccgag

SEQ ID NO: 258219 - RNA, 76 nt, Homo sapiens; identical to SEQ ID NO: 18500

SEQ ID NO: 258220 - RNA, 72 nt, Homo sapiens
cccaaaagccgacgagacaggagaaaagaagaagaagagccaccgaccgagaacacccacgaagcaccgccc

SEQ ID NO: 258221 - RNA, 45 nt, Homo sapiens; identical to SEQ ID NO: 139756

SEQ ID NO: 258222 - RNA, 78 nt, Homo sapiens
cagcccgccagaggcggcgccgaggccacggaggccagcgcacgaaaaggcaaaacgacaagcagcaagaggaacaga

SEQ ID NO: 258223 - RNA, 83 nt, Homo sapiens
cgcggccgcggcaccccgaacggggccccccgcgcgaggaagaagaccaaaggacaaaaaagacggagagagaacaggccaac

SEQ ID NO: 258224 - RNA, 62 nt, Homo sapiens
gcaggaggagaaggcaaagagccagcccgaacgaaggggaccagagcagaaacaggccggaa

SEQ ID NO: 258225 - RNA, 67 nt, Homo sapiens
ccgaccgcagccgcgagagcgacaccacaaggccacagagaagaaaggggggagaccgcgccacccc

SEQ ID NO: 258226 - RNA, 80 nt, Homo sapiens
ccagccccggcagcgggacccggcgaagacgcgaccgcggcgcgagcaccaggacaggccccggaacaagaggaggacag

SEQ ID NO: 258227 - RNA, 85 nt, Homo sapiens
gggcccggcggcgcgagcaggaaggagcggccgccagcgaggccacgcggccaccagaccgaccgagggcccgcacacgcacgca

SEQ ID NO: 258228 - RNA, 43 nt, Homo sapiens; identical to SEQ ID NO: 157807

SEQ ID NO: 258229 - RNA, 42 nt, Homo sapiens
ggacgcaagccgcgggccgccggacccagcaggacgggaacc

SEQ ID NO: 258230 - RNA, 56 nt, Homo sapiens
aagacggaaacgaggaaaccgggaaagccaccgaaaaggcagccgaaaggcgaagg

SEQ ID NO: 258231 - RNA, 44 nt, Homo sapiens
caggagcagccgccaggccgagagcacgagaaggccggaacaac

SEQ ID NO: 258232 - RNA, 42 nt, Homo sapiens; identical to SEQ ID NO: 90367

SEQ ID NO: 258233 - RNA, 78 nt, Homo sapiens
ccccgaccgggcgccagcccccggacagccgcccgggagccggagaaggcggaggaaaagcccaaggagacggccaag

SEQ ID NO: 258234 - RNA, 74 nt, Homo sapiens; identical to SEQ ID NO: 178062

SEQ ID NO: 258235 - RNA, 72 nt, Homo sapiens
gagggacaagccccgagccgcgccgaccagcggagcgacgcaggaggaagcgaagccccgagcagcacaggc

SEQ ID NO: 258236 - RNA, 69 nt, Homo sapiens
ccaggcgccagcagggccaaccgcagaggccgacgggaagaagcgaagcggaacaagcaacccaaccga

SEQ ID NO: 258237 - RNA, 79 nt, Homo sapiens; identical to SEQ ID NO: 241427

SEQ ID NO: 258238 - RNA, 121 nt, Homo sapiens
acagccggcggcgaaggcagcgccgacggcagccggcaccgacggcggaccgacccgagccggggggagcaaagcgggaaagacccacacagcagaggacaaaacggacgggaaaaaaagc

SEQ ID NO: 258239 - RNA, 64 nt, Homo sapiens
cagcaagaacagagagagaggggacagacgagagaacgagggcagcggaacgcgccgacgccgc

SEQ ID NO: 258240 - RNA, 85 nt, Homo sapiens
ggagacgggcggccggccgacccccgcgcgacggcgacgcgggaggccagagggagcgccgagcaacccacggccggaccccaga

SEQ ID NO: 258241 - RNA, 86 nt, Homo sapiens
ccggcccaggcggcccgagaaaagcaggagaagcgggagccgaagcggcaccggaggggagcggagagggcagaggagcggcggag

SEQ ID NO: 258242 - RNA, 80 nt, Homo sapiens
acggcgaacgggaccccgcagaagagaagggcaaacgggaacgccaacccacccaaagcaccgaagggggcaccccaaac

SEQ ID NO: 258243 - RNA, 87 nt, Homo sapiens
gcaaagcccgagaaacagccaggaagcgcaacaggaaaggagagaagaaggcaagggccacggcacccagaaggcgcgagaagggca

SEQ ID NO: 258244 - RNA, 82 nt, Homo sapiens
aggcgcgggacggaacagaaaccgggcaaacccggacgaggggcaggaccggggacacacgacgcgggacgagcccgccgcc

SEQ ID NO: 258245 - RNA, 72 nt, Homo sapiens
ccggccaggcacaagggcaccacaaagagcgaacgaagcggaagcaccagaaaacagccccgaaccagaaag

SEQ ID NO: 258246 - RNA, 80 nt, Homo sapiens
cgggacgccgggccgcgggcggacccacaggagacaagggaaggagaaaacacaaagcggacagagcccacggcgcagag

SEQ ID NO: 258247 - RNA, 48 nt, Homo sapiens
ccgccccagaccgcggcgaaaggggcaacgcccccagccccccacccc

SEQ ID NO: 258248 - RNA, 73 nt, Homo sapiens; identical to SEQ ID NO: 43849

SEQ ID NO: 258249 - RNA, 81 nt, Homo sapiens
agaggacagcaaagaagacagaaaaagcaacaacacaaacagcccaagggaagcaaccccacagcggcagacaaccggaaa

SEQ ID NO: 258250 - RNA, 83 nt, Homo sapiens
cccccaacgccccggagccgccggccgcagcgcagcgccagccagggaggcagacagaaaaagaaacgcaaggaacagagcag

SEQ ID NO: 258251 - RNA, 103 nt, Homo sapiens; identical to SEQ ID NO: 119551

SEQ ID NO: 258252 - RNA, 77 nt, Homo sapiens
gaagccacacaaagaacaaagcagggagggaaacgaacagccaagacccaaacaaaccaacaacaacccggcaaccc

SEQ ID NO: 258253 - RNA, 55 nt, Homo sapiens; identical to SEQ ID NO: 188144

SEQ ID NO: 258254 - RNA, 34 nt, Homo sapiens
caccccacaaaaaaaccaggagagagagaaaggg

SEQ ID NO: 258255 - RNA, 71 nt, Homo sapiens
cggcggcacccccggccagacagacaggagggaaacacgaaagccaaggaggagagggagcccccacaagg

SEQ ID NO: 258256 - RNA, 135 nt, Homo sapiens
ccagaggcagcagcagcaagaggccccggagggcagcagcagcagcagcaacaacagcggcgcagagaaggccgggaggagcagccggccaacaggcagggcccacaagaccaccgcgccccccgagcaggcccg

SEQ ID NO: 258257 - RNA, 53 nt, Homo sapiens
cacaaggaaaaggacagaacaacgccagaaagaaagccaccagagagggcagc

SEQ ID NO: 258258 - RNA, 73 nt, Homo sapiens
caacgccaaccagagaaacagaccaaccaaggcggaaagcaaagaaccaagcggcacgcaggcaacacgagcc

SEQ ID NO: 258259 - RNA, 70 nt, Homo sapiens; identical to SEQ ID NO: 194180

SEQ ID NO: 258260 - RNA, 109 nt, Homo sapiens
gggggcaagcaagccaacacccagcagaaaaaaacaacagaagacggacacggaggaaggcgccagaaaaaaaaacacggaaaaaaccaagagacagcgacgaaacaga

SEQ ID NO: 258261 - RNA, 73 nt, Homo sapiens
ggaccacagcgagaccgcgccggcgaccagggcagagcgcaaaaacacagaagcggagaacaagagcagacaa

SEQ ID NO: 258262 - RNA, 111 nt, Homo sapiens
ggggccaaccagcgaagagcgacaagccgcggcagccgcggaccaccgccgccaggacgaggagcgccaggaaagaggcagagacgaagcagaagcgaggcagacaagccg

SEQ ID NO: 258263 - RNA, 72 nt, Homo sapiens
gggaccgaggaaagacggaagagaccagcagccagagccaaacaccgagcaagaagaggccgaagacaagcc

SEQ ID NO: 258264 - RNA, 42 nt, Homo sapiens
gaggaggaggcgaggaggagagacagcgaaaagcaaaccgga

SEQ ID NO: 258265 - RNA, 103 nt, Homo sapiens
gcgagcacacaaaaaaaccaaagaggagccagaccagaccaccaggcaaccggaagaggagcacagcccacaggccgcaccagaagcggcggccgcgccaggg

SEQ ID NO: 258266 - RNA, 62 nt, Homo sapiens
gccgccgaaggcgggcgcagcggcggagcggagcggagcccggaggaaggacgagaagggcg

SEQ ID NO: 258267 - RNA, 75 nt, Homo sapiens
gcgggacggggccaggaccccaggaaggacaggagccccacaccggaagaagaacgaccagcaagggaacgaagg

SEQ ID NO: 258268 - RNA, 35 nt, Homo sapiens
ggaccaagaggcgacggcgagcccccagaaaagcc

SEQ ID NO: 258269 - RNA, 67 nt, Homo sapiens; identical to SEQ ID NO: 178042

SEQ ID NO: 258270 - RNA, 82 nt, Homo sapiens
caggcgacccgacgggccaccgcccagaaacagacaaggaggacccgcccggagacagaggaggaaaggcagcagaagccgc

SEQ ID NO: 258271 - RNA, 121 nt, Homo sapiens
cgagggccaggcccagccgcagccgcagcagcagccgccgcggcggcacggaggagccagacacaaagagaggcaagcggacgggcgcaaaccagggcggcgggacgccgaaacaccaacc

SEQ ID NO: 258272 - RNA, 115 nt, Homo sapiens
cggccgagaggaagacgagccgggaggaacggcccggaaacaggaggacggcgccagggaaggaccgcacacaagccgcaccggacacgcgcggagcgggaggaccgagccgccc

SEQ ID NO: 258273 - RNA, 78 nt, Homo sapiens
gcacccaaagggagccccggggagggcaaggaggaggcaagggccgaaggacccccagccggcccgcgagccccacgc

SEQ ID NO: 258274 - RNA, 82 nt, Homo sapiens
agcgcggaaaggcaacgcgcggggagggcgggcccggaggacgaggagcaggacaacggaccaccaaaggcgcgaggaaaga

SEQ ID NO: 258275 - RNA, 58 nt, Homo sapiens
acacccgagacccagacagagcacaacagcccagcggcagcacaccccgccaaaccaa

SEQ ID NO: 258276 - RNA, 70 nt, Homo sapiens
cagaggaaacgagggacaacacagacccaccagcagaacagcccaccgaggaagaccaaaggaccaacca

SEQ ID NO: 258277 - RNA, 64 nt, Homo sapiens
ccccggccggccccgcccccggccgagcgacgagagcggaagccggcagaagaagacccaccaa

SEQ ID NO: 258278 - RNA, 70 nt, Homo sapiens
acccaagcagaagaagaaaagacacaagcaaaaacaaagagaagaaacaaccccacaaccgaacgagagc

SEQ ID NO: 258279 - RNA, 79 nt, Homo sapiens
agcccccaccaaccaccacaggacacaggcggagaccgggagacgggccaaacagccacgccacagaggaaagaggcgg

SEQ ID NO: 258280 - RNA, 59 nt, Homo sapiens
cggcacccacggacacggcagaacacggaacaggggcgagagaacggccagggcggagc

SEQ ID NO: 258281 - RNA, 81 nt, Homo sapiens
ccgggcgcccggcgaaggagccgcggcggggggaaaaggagccccaccaagggcagccccgggcaaccagcaagcccagag

SEQ ID NO: 258282 - RNA, 38 nt, Homo sapiens
aagcagcggacaaggagaaagggcagcgacacccagac

SEQ ID NO: 258283 - RNA, 77 nt, Homo sapiens
gcacggggcaggaaacagaagaggggcgccccagcccagcagagagacacgcacaccagcgacgagaaaaccaaaaa

SEQ ID NO: 258284 - RNA, 77 nt, Homo sapiens
cggcgcgggggaggaacaacaacggcaacagggccggccagccaaagcaccggacggaaacccagagcaaaagggag

SEQ ID NO: 258285 - RNA, 64 nt, Homo sapiens
cagcaggacagccagaacaggagagaaaaaaggcagggaagggaaaagaaaggccacgggagga

SEQ ID NO: 258286 - RNA, 84 nt, Homo sapiens
cggcggcggcggcggcggcggcggcggcgcagaacgaagccacccaaagcagacaagaaaagcaagagaaaaggacagagagac

SEQ ID NO: 258287 - RNA, 73 nt, Homo sapiens
ggcggcagggggaggggaggggagggggcgcggggaacgggagcggagaggagagcgcaaccaacccacgacc

SEQ ID NO: 258288 - RNA, 79 nt, Homo sapiens
aacccagcacacccacggggcagagcagacaaccagacgccaggccaacaggcaaaacaagaaggcacaaagagcacac

SEQ ID NO: 258289 - RNA, 76 nt, Homo sapiens
cagaaaaggaaagaaggcaggggacgaacagacgcggaacacaaaacaggcaaccagaacaagagcgggacgagga

SEQ ID NO: 258290 - RNA, 109 nt, Homo sapiens; identical to SEQ ID NO: 236093

SEQ ID NO: 258291 - RNA, 76 nt, Homo sapiens
aaagcgagaaaacacccaggcccggcggagcaggcagcgcccaccccaacagggcagcaagggcagcaagcagaac

SEQ ID NO: 258292 - RNA, 73 nt, Homo sapiens
cccggaccgaggagaaaccggaccagcgaacccacaggaaagaaacaggaaaccggagaagacacaccacaga

SEQ ID NO: 258293 - RNA, 73 nt, Homo sapiens
aaagcccccagggagagaacagcgcagcgccgaaaagaagaggagcacaggcagccaaggcaagcaaggaaga

SEQ ID NO: 258294 - RNA, 80 nt, Homo sapiens
ccagcgcccgagcagcgcagaggcccgagagacagcgcaaaacccaagaggggcggaaaaaagaggagagaagaaaacgc

SEQ ID NO: 258295 - RNA, 71 nt, Homo sapiens
gggaaacaccagcagaccaaaagaggcgcgaacagggcccacccgccacgacacaggggaagaagaccacc

SEQ ID NO: 258296 - RNA, 36 nt, Homo sapiens
ggggccggcagaaacaaaggaacagccagaccaaaa

SEQ ID NO: 258297 - RNA, 79 nt, Homo sapiens
cgccaccacgaagacacagggaccaagcgagagcccgaagcacagcagggagcagaggcaccagcccaggcagaagaac

SEQ ID NO: 258298 - RNA, 74 nt, Homo sapiens; identical to SEQ ID NO: 145391

SEQ ID NO: 258299 - RNA, 72 nt, Homo sapiens
ccgcgacagaggagggaggaaaacaaccgagggcagagaagagcgcgacacggggggcaagcgcgcaccgga

SEQ ID NO: 258300 - RNA, 78 nt, Homo sapiens; identical to SEQ ID NO: 122190

SEQ ID NO: 258301 - RNA, 84 nt, Homo sapiens
cacccagcacgcgcagggacaggagacccacagaggaaaacaaccccggggccacaaagcgaggcgaccaagaccaggcacaga

SEQ ID NO: 258302 - RNA, 75 nt, Homo sapiens
ggcgcaccacggccaggcaaagaaagacgggagccagagaagaaccaggagaaagcaaaccacaaacagacacgg

SEQ ID NO: 258303 - RNA, 65 nt, Homo sapiens; identical to SEQ ID NO: 168414

SEQ ID NO: 258304 - RNA, 74 nt, Homo sapiens; identical to SEQ ID NO: 90878

SEQ ID NO: 258305 - RNA, 107 nt, Homo sapiens
ggggagcgccccaccaacaggcccgcagagaagcagggcggcacgaacggccagcagaacccagaaagagcccaagacccgacccggaaggacgccgaagaaccacg

SEQ ID NO: 258306 - RNA, 38 nt, Homo sapiens
cgagcgcaaggagagggcacccggcgcgcacacaaaga

SEQ ID NO: 258307 - RNA, 45 nt, Homo sapiens
cacaaaggaaaacccgagacaagcggggggcccgggcacacgggc

SEQ ID NO: 258308 - RNA, 68 nt, Homo sapiens
agcacagcgaaccagcaacaggagacagagggaaggaacaccccacgacaagcgcagagagaaagccc

SEQ ID NO: 258309 - RNA, 62 nt, Homo sapiens; identical to SEQ ID NO: 222662

SEQ ID NO: 258310 - RNA, 67 nt, Homo sapiens
cggcccaagggccggcagggggaagagcccccccaacaaaggacgaaaagggcggcaagggcagccc

SEQ ID NO: 258311 - RNA, 68 nt, Homo sapiens
agaacgcaagagagccaagaaaagggcaaaacacagcgagcgacagaccacaaggggaggacaaagcc

SEQ ID NO: 258312 - RNA, 75 nt, Homo sapiens
gggacgcgaacacagagggaagagaaagcaaacgagcagggcaagggaaaccaagccccaggaggcaaccagccg

SEQ ID NO: 258313 - RNA, 70 nt, Homo sapiens
aggaaccaagacgcggaacagcacaccaggagagaagcgacagccgcaggaagcaacaaacacaacccag

SEQ ID NO: 258314 - RNA, 51 nt, Homo sapiens
gccccccagcaccgggcggacgggacaagcgcacagcggagaaagcagcgc

SEQ ID NO: 258315 - RNA, 83 nt, Homo sapiens
aaaaaagacccaagaaagcacggacagcggaaaagcggccccaaggcgaacaaaaggcagaagacaaagcggggaaaagcaac

SEQ ID NO: 258316 - RNA, 71 nt, Homo sapiens
ggaggacgagagcccaagaccggaaggggaagcaggccaacccagaacacaccccagcggggaagaccaac

SEQ ID NO: 258317 - RNA, 74 nt, Homo sapiens
cacggcccaagaagaccaacacagaccgcagcccccggcgccaccagcagccaaagaccacgaacgaagaaacc

SEQ ID NO: 258318 - RNA, 58 nt, Homo sapiens
ggggcccccccgcggggcagagggggccaaagggcgagggcacaaaaaaccacacccc

SEQ ID NO: 258319 - RNA, 96 nt, Homo sapiens
cccacccaggggacccagacgccccaggacaccaccagccggaggaccaaggcacccgcgagcccacgggcggagccccgggaccaacacagcgcc

SEQ ID NO: 258320 - RNA, 70 nt, Homo sapiens
cgccgggccagaacacccgaggggaccagccacaggaggcggccgcacaaagaaagccccaagaagaagg

SEQ ID NO: 258321 - RNA, 79 nt, Homo sapiens
ggcagcagagggaacagcaaagaagagccgggaccggcccccgccacccggacaggcgagcacaacggggggacaagcc

SEQ ID NO: 258322 - RNA, 96 nt, Homo sapiens; identical to SEQ ID NO: 197896

SEQ ID NO: 258323 - RNA, 83 nt, Homo sapiens; identical to SEQ ID NO: 42456

SEQ ID NO: 258324 - RNA, 54 nt, Homo sapiens
cggccgggacggaggacgcgcagggagcgaccggagagagccgaggaaagacac

SEQ ID NO: 258325 - RNA, 106 nt, Homo sapiens
aagaagaggaaaaagaggagaagaagcgaacgagcaaacaagaaccagagggcggaacagaacgacaggagaacagaccagagcgaagaacaggaccacccaggca

SEQ ID NO: 258326 - RNA, 82 nt, Homo sapiens
cgccgcagacgcgaggggcggccagagcgccggcaagagccgggcggagaaccggggccgaggaagagaaacaccaaggaac

SEQ ID NO: 258327 - RNA, 35 nt, Homo sapiens
ccaaaccagagcaacagccaggaaaggaagaacac

SEQ ID NO: 258328 - RNA, 71 nt, Homo sapiens
agagagcccaacgccgggccaagaccccgagggaccccgacggagagacaaagaagacggagggggggcca

SEQ ID NO: 258329 - RNA, 37 nt, Homo sapiens
gccacaccccccccccaccagggagccacaccacagc

SEQ ID NO: 258330 - RNA, 76 nt, Homo sapiens
aagaagacagaacaagggaggcaaaaaaaacgacccgaagggggaaagacggaaaagaagagcgaaggaagaaagg

SEQ ID NO: 258331 - RNA, 73 nt, Homo sapiens
aacccgaagaagaaaggacgacagccagagagagggcccagaggagacaggggaaccaggaggaggacagcca

SEQ ID NO: 258332 - RNA, 83 nt, Homo sapiens; identical to SEQ ID NO: 144432

SEQ ID NO: 258333 - RNA, 96 nt, Homo sapiens; identical to SEQ ID NO: 257149

SEQ ID NO: 258334 - RNA, 38 nt, Homo sapiens
ccagagagcagcagccgccgacaagagaaggacccaga

SEQ ID NO: 258335 - RNA, 84 nt, Homo sapiens
cgccgcggcagccaccccggccgccaaaccccagcggaacccggccacagccagcagcagcagccgcgaacgcggccgggaggc

SEQ ID NO: 258336 - RNA, 71 nt, Homo sapiens
cagcccccccgcccgcgcgccccggagcgcgaaggagcgcggcaagggggaacaggcaaagggcagcaccg

SEQ ID NO: 258337 - RNA, 72 nt, Homo sapiens
gaggccagacagacacggaaggcggacagacagccaaccaccggccagcgggggagagcagcggcgccagcc

SEQ ID NO: 258338 - RNA, 58 nt, Homo sapiens
ggaggacacccaacccgggcagagccacgggcccgggaaccggaccagaccggcccag

SEQ ID NO: 258339 - RNA, 90 nt, Homo sapiens
caccgggcggacagcccccgcccaggagaaagccagggggaaaccgagggaccaggggggaggaagcacacagcagaggaacaagaccac

SEQ ID NO: 258340 - RNA, 94 nt, Homo sapiens; identical to SEQ ID NO: 108070

SEQ ID NO: 258341 - RNA, 69 nt, Homo sapiens
gagagggacagcccccccacggccaggaaaccacagccccagggagcagccagggccaacgacccccaa

SEQ ID NO: 258342 - RNA, 95 nt, Homo sapiens
ccacgcgacgggaccgagagaccgcgacacgggggccagaaggaaagcaaggagcaggaggagaagaaaccccaagaccagagggcagcccagaa

SEQ ID NO: 258343 - RNA, 44 nt, Homo sapiens
aagaggagaaggagcagccggccaagccagaggaccaagacaga

SEQ ID NO: 258344 - RNA, 109 nt, Homo sapiens
cggacaccccgccagcaagcccacggccgagcacagaagccgcacccagcagagcagcggaaacagagaaggagagagacccccggagacacgcgcagacgcagaagga

SEQ ID NO: 258345 - RNA, 78 nt, Homo sapiens; identical to SEQ ID NO: 23207

SEQ ID NO: 258346 - RNA, 70 nt, Homo sapiens
aaacagacccaaacacgaggaagaccagcaaggaaaagcgaaacggccagagaaagacaagcacgagacc

SEQ ID NO: 258347 - RNA, 78 nt, Homo sapiens
gaaaccagcgcggggaagaagggcggagaagacaagaaccaaaggggccgggaaccgcggcacagcggacagacaagg

SEQ ID NO: 258348 - RNA, 78 nt, Homo sapiens
acgccaccggcgccagcgggcgaggagccggaccagaccgccggagcacgccgagaccaccgaggacacaaccgccca

SEQ ID NO: 258349 - RNA, 75 nt, Homo sapiens; identical to SEQ ID NO: 71798

SEQ ID NO: 258350 - RNA, 84 nt, Homo sapiens
gcgccggagcgacagcagcaagggcaggaaccacagagaacagcccggacacgcgcaccccgaggacacgggagcagaaggcag

SEQ ID NO: 258351 - RNA, 60 nt, Homo sapiens
aaggcgcaagaaaaggagccggaaacggacaaacagaagcgcaacggcgccccgagcccg

SEQ ID NO: 258352 - RNA, 79 nt, Homo sapiens
ggacacaagggacgcagaagcgggcccccgccccagcaggacaaacgcacccggcgaagcccgacacgggagcgcgagg

SEQ ID NO: 258353 - RNA, 70 nt, Homo sapiens; identical to SEQ ID NO: 47546

SEQ ID NO: 258354 - RNA, 114 nt, Homo sapiens; identical to SEQ ID NO: 93924

SEQ ID NO: 258355 - RNA, 70 nt, Homo sapiens; identical to SEQ ID NO: 128303

SEQ ID NO: 258356 - RNA, 84 nt, Homo sapiens
aagaagcacggcaccaaaaacaagcgcgggccgagaaaaggggccagcgagccggacgccgggaaggaagaacagccagaccca

SEQ ID NO: 258357 - RNA, 104 nt, Homo sapiens
gaagccggccgacgggcacacgagcccgcaaccacgccacggcggcaaagcgggaagacacggcacacaagggaaggcgagccggaaggcacgaccacagggag

SEQ ID NO: 258358 - RNA, 81 nt, Homo sapiens
cgcccgccgaggagcgacgcaccgcaggcacaaaccgaagagcccggggcgggacgccacgaaagaaagggagacagaccg

SEQ ID NO: 258359 - RNA, 76 nt, Homo sapiens
agcgaggaggagcgagcgcgagagacaacaagggagggcacagccaagacaacaaccaagcaccaggaaaaccgag

SEQ ID NO: 258360 - RNA, 73 nt, Homo sapiens
gcccaaaggccagagcacagcgccaaagcaggaccgacagaaccgagaagcaggccgggccaagaacgggacc

SEQ ID NO: 258361 - RNA, 78 nt, Homo sapiens; identical to SEQ ID NO: 207665

SEQ ID NO: 258362 - RNA, 80 nt, Homo sapiens; identical to SEQ ID NO: 192870

SEQ ID NO: 258363 - RNA, 87 nt, Homo sapiens
caggaggccaagcggcaacaccagcagacggggcgagaagcggcagaagcagagccacccaaggggcggagcggcagcggaggagaa

SEQ ID NO: 258364 - RNA, 89 nt, Homo sapiens
ggggccaccgggcagcgggggagcggcgcagcggcggcagcggagagcgagagaggggagcaggaaccccaggagcaaaaagaaaggga

SEQ ID NO: 258365 - RNA, 119 nt, Homo sapiens
gggaaggcggacgcggaggaaccccaggagcacaccacaccaggggggagagacaagaacgagcaaggggagcgccaggaacacagaaaaagcagcaccggcacagcgggcgcagccca

SEQ ID NO: 258366 - RNA, 71 nt, Homo sapiens
cagagaaaaagaaagcgaaacgccagcggggaacagaaggggggagcaaagcgggaaagacccacacagca

SEQ ID NO: 258367 - RNA, 94 nt, Homo sapiens
cccgacacaggagcgggcagaggagcagggaggccacaggggccgaaacacagagcaagggccaggagggagggcacggaggaccagaggcgga

SEQ ID NO: 258368 - RNA, 104 nt, Homo sapiens
ccaccaccacgccagccgcaccagccgcccaagccgcacagccgcggcggcagcagcaggagaggacaccagcagccgcaacggcacacacgcccgccaccacc

SEQ ID NO: 258369 - RNA, 103 nt, Homo sapiens
gccggaacccgcaggaggaccgagcgacagcgcacggcagcggcaccacggcgacgcacaagagacggagccagaaggaagaggaggacacgacccagggcgc

SEQ ID NO: 258370 - RNA, 75 nt, Homo sapiens; identical to SEQ ID NO: 21335

SEQ ID NO: 258371 - RNA, 80 nt, Homo sapiens
ccgcggcccgggccgcaccagagcgcccggcccacgacacaggaagaagacaggaccccgggaaggaggggcaaccaccc

SEQ ID NO: 258372 - RNA, 81 nt, Homo sapiens
acgaccggcggggggcgcggcgccgggacgcaccgcaccgagggcgagcccagcgaagcgcgagaaagaaagcggccaaga

SEQ ID NO: 258373 - RNA, 84 nt, Homo sapiens
aggcgcacgaggccgcggagccggacgcggggggcgggaagagccggggccgggcgacaggagcaggacgaggccgaccgggga

SEQ ID NO: 258374 - RNA, 78 nt, Homo sapiens
gagacacaggccgcgaccgggaggaggaccgacaagacgagagccggacgagaaaagcggccaggaccaccaggcggc

SEQ ID NO: 258375 - RNA, 67 nt, Homo sapiens
gggccaagcaccggccacaacaacaccccagcccagacacgaaaaaggggcaaggagcggcccccaa

SEQ ID NO: 258376 - RNA, 73 nt, Homo sapiens
agagccacgcgaggacagaaaacgcaagacaacaggagaggaaagcggaaagccaagcgacgcagccccagac

SEQ ID NO: 258377 - RNA, 87 nt, Homo sapiens
gccggacgacggaaggagaaacgacaggcaacaagacaagcggcggggccccggagagcgacgcggcaggcagcgagaggaaggggc

SEQ ID NO: 258378 - RNA, 65 nt, Homo sapiens
gaccagcagaacaagagccagcaaagaacagcagcagaaggcacgcaaagcaggggcacgcgcgc

SEQ ID NO: 258379 - RNA, 79 nt, Homo sapiens
gggggaaggacgagcaccgaggcccccggccaccaggggacaggacgcagggccacagcgacccacggccgacgggggc

SEQ ID NO: 258380 - RNA, 69 nt, Homo sapiens
ggacgagaccaggaaaaagggaggggcgacagaccacagcccggaagagacagcgagcagagaccagga

SEQ ID NO: 258381 - RNA, 76 nt, Homo sapiens
accacacccaaccgccacggaaggaaaccagcccgagcagcagccgagaaagggggccaggcaaacaacagaacac

SEQ ID NO: 258382 - RNA, 82 nt, Homo sapiens; identical to SEQ ID NO: 41475

SEQ ID NO: 258383 - RNA, 79 nt, Homo sapiens; identical to SEQ ID NO: 225974

SEQ ID NO: 258384 - RNA, 45 nt, Homo sapiens
ggaagagggcgggcgcgacagaccagccgaggagccggacacagc

SEQ ID NO: 258385 - RNA, 103 nt, Homo sapiens
agcggaggccacaccgaagaccaccagagccggaccaggagaacggcggcggaagccagacagccgaaacaacaccagccgggagccgcccgcccccacacgc

SEQ ID NO: 258386 - RNA, 39 nt, Homo sapiens
ggcaacggcagcagcagagccccacagaacaccggaaag

SEQ ID NO: 258387 - RNA, 38 nt, Homo sapiens
gaggaaacccgacagcaaagaaaagagcacgccacgcg

SEQ ID NO: 258388 - RNA, 75 nt, Homo sapiens
gcggcggcccaggcccggccccgaagagagcccggaaccaccggccgcagccgcagaccagaggacaacacaagg

SEQ ID NO: 258389 - RNA, 76 nt, Homo sapiens; identical to SEQ ID NO: 71849

SEQ ID NO: 258390 - RNA, 79 nt, Homo sapiens; identical to SEQ ID NO: 95942

SEQ ID NO: 258391 - RNA, 91 nt, Homo sapiens
ccagcaccggcgaagccgggccaaaggacgaagaacccacagagggccaggacaagccgaggcaccgcaggcccacacaagcaaagccggg

SEQ ID NO: 258392 - RNA, 90 nt, Homo sapiens
ccggccaccccacagggacacacaacagaaaaggaagcacggacgagcaagaagacaaacaagggaaggccgcacaggccaaggaggaca

SEQ ID NO: 258393 - RNA, 72 nt, Homo sapiens
aggacgcaccgaaacagcagccggagcccagcaggcaagaaaccccggacagaaggcacggcgaacaaaggg

SEQ ID NO: 258394 - RNA, 126 nt, Homo sapiens
gaagaggcggcggcgccgaagaggcgacgaggccggacggggcggacggcgacgcagcccgcggcagaagaaacgaacaggcgaaacagcacaaacaaaaagaaaccgagaagaaggaaaaaagag

SEQ ID NO: 258395 - RNA, 76 nt, Homo sapiens
cagaaagaaaggagcgccccaaaaggaaacagggggacaaagcgagaacgggacaaggcggaaagagaccagaagc

SEQ ID NO: 258396 - RNA, 74 nt, Homo sapiens
cccacgccaagcaccaagaagaaccggcacaagcaggccagaaccacgacacccaagaagacacgggaggaaga

SEQ ID NO: 258397 - RNA, 77 nt, Homo sapiens
aagagagcgcacgaccacagcagagaaggaacagcaaccaacgaagaaaagagaaaacagaccggaaaaccagccaa

SEQ ID NO: 258398 - RNA, 71 nt, Homo sapiens; identical to SEQ ID NO: 113152

SEQ ID NO: 258399 - RNA, 72 nt, Homo sapiens
gggagggacaccgcggaggcggcggcccagaacagggcgagaggcgagccacgcggggcggcgccgccgccg

SEQ ID NO: 258400 - RNA, 50 nt, Homo sapiens; identical to SEQ ID NO: 2192

SEQ ID NO: 258401 - RNA, 78 nt, Homo sapiens
ccacccgggcagaagagacgcggaccacgaccacacgaaggggcagaagagcacaagacggaagagaggagcgaccag

SEQ ID NO: 258402 - RNA, 98 nt, Homo sapiens
ccggcagcggcggcccgggagcgacggaggaacgggagaaacagcagaagcggggggagagagcgagccccggcagccgccgaccaccgggggagaga

SEQ ID NO: 258403 - RNA, 107 nt, Homo sapiens
aaccccaaccccgcacaagaggacagcccagccaaggcgagcagacagcagcccccggggcagcacgcccaccggagggacccgacgaagggacacaaagaccccca

SEQ ID NO: 258404 - RNA, 58 nt, Homo sapiens; identical to SEQ ID NO: 145561

SEQ ID NO: 258405 - RNA, 100 nt, Homo sapiens; identical to SEQ ID NO: 92092

SEQ ID NO: 258406 - RNA, 41 nt, Homo sapiens; identical to SEQ ID NO: 200021

SEQ ID NO: 258407 - RNA, 74 nt, Homo sapiens; identical to SEQ ID NO: 61990

SEQ ID NO: 258408 - RNA, 80 nt, Homo sapiens
gccaaaaggcccgagagaccaacgccccgcccacaacaggggcaccgcagcagcgaaacgaagcacaagaagcccggaac

SEQ ID NO: 258409 - RNA, 41 nt, Homo sapiens
gagcacccgccccgggcaccaacacacagaaaagcccacga

SEQ ID NO: 258410 - RNA, 74 nt, Homo sapiens; identical to SEQ ID NO: 111179

SEQ ID NO: 258411 - RNA, 110 nt, Homo sapiens
ggacgcgagcggcgagccggagcgcggagcccggccccgcaccaggaggaggacgacagcacgagaggaaacagcggaggaggccacaggcacgcacgaagacgccggcc

SEQ ID NO: 258412 - RNA, 74 nt, Homo sapiens; identical to SEQ ID NO: 205850

SEQ ID NO: 258413 - RNA, 71 nt, Homo sapiens
gcagacgcagggaacgaaacaagaacaccaggaggaagacaaaagagaaaaaccgggagaagcggacagca

SEQ ID NO: 258414 - RNA, 77 nt, Homo sapiens
ggcccgccaagaagaagcggcaaagaaaaaaggagggagagcacggcgcaccaacggcagagaagcacagcacaagc

SEQ ID NO: 258415 - RNA, 70 nt, Homo sapiens
aaaaccagcgagaccaaaacaaagacaagcaccagcagaagcaaacaggcagaaaaagaagaaggaccgg

SEQ ID NO: 258416 - RNA, 68 nt, Homo sapiens; identical to SEQ ID NO: 217898

SEQ ID NO: 258417 - RNA, 69 nt, Homo sapiens; identical to SEQ ID NO: 11234

SEQ ID NO: 258418 - RNA, 62 nt, Homo sapiens
gagaggaccgcaggcccgagagacgggcagacaacgaacaagcgaagaaccagcagcaagac

SEQ ID NO: 258419 - RNA, 92 nt, Homo sapiens
gcggggagccccgcaaaccggccgaacaggcccggggcaccgagaaggagcgaggagccaaggagaagaaccaccagcacaagcccacacca

SEQ ID NO: 258420 - RNA, 77 nt, Homo sapiens
gaccggcccccagcaccggcccaaggccacaccggacacgaggacgcacagaaggggcaaggagacaggcagcggcc

SEQ ID NO: 258421 - RNA, 77 nt, Homo sapiens
aacagcgccggggagcagggggaccccaagagcgcagaagaggaaggggcgagccgccaagagaagcaaaagacaaa

SEQ ID NO: 258422 - RNA, 72 nt, Homo sapiens; identical to SEQ ID NO: 87085

SEQ ID NO: 258423 - RNA, 69 nt, Homo sapiens
gaagaagcaaacagccagacagaaacagggagcagggcggcagacccgcaggaccacacaccaggaagc

SEQ ID NO: 258424 - RNA, 75 nt, Homo sapiens
ggggaggccgacgcccacgcgcgagaacagaaagccaaagggaggacaccagagagaaacaccccgggagccaaa

SEQ ID NO: 258425 - RNA, 70 nt, Homo sapiens
acagacacagaaaggggcaagaaaagcccgaaaaaaacaaaacaaaacggacagaagaccggcaacagag

SEQ ID NO: 258426 - RNA, 95 nt, Homo sapiens
cggcgaggaggcgccacacccccccgacgccgcgcggggacgcaagggaggaacaaaagaaaaaggaacgggggaacgacagcagcaggaccaga

SEQ ID NO: 258427 - RNA, 77 nt, Homo sapiens
aaaaagcggagaagagcccagaagcgaggcgaagcagcggcgagaaacgagagcacgagaaagaaggccagaaggca

SEQ ID NO: 258428 - RNA, 47 nt, Homo sapiens
aggcacagccgacgccgcgggcaacccagaacgccaggaggaccaga

SEQ ID NO: 258429 - RNA, 42 nt, Homo sapiens
ggagggcaccaaccacaaaggcaaaggcagccgagcaccacg

SEQ ID NO: 258430 - RNA, 78 nt, Homo sapiens
cgacaagccgagaaagagagaaaagggggagcccgacccaagccgaagccccaaacacccagacagaggggcccggca

SEQ ID NO: 258431 - RNA, 85 nt, Homo sapiens; identical to SEQ ID NO: 157667

SEQ ID NO: 258432 - RNA, 79 nt, Homo sapiens; identical to SEQ ID NO: 8222

SEQ ID NO: 258433 - RNA, 79 nt, Homo sapiens
ggagagagagacggaggagcaggaggcagacccagaaaaggaccaccccccgacgaaccggggaggaaggccaccaaag

SEQ ID NO: 258434 - RNA, 73 nt, Homo sapiens
aaacaggagccccagcgccaccgccgaccgaagccgcaaaaaaacaaggcagacccggaaaccagacgacaga

SEQ ID NO: 258435 - RNA, 86 nt, Homo sapiens
ggaccaccgccgccgccgccgcgggaccgaggcgggcgcgggcgcgggcgccccggcgagccacggcgaaaacgcaaacaagagag

SEQ ID NO: 258436 - RNA, 73 nt, Homo sapiens; identical to SEQ ID NO: 216852

SEQ ID NO: 258437 - RNA, 69 nt, Homo sapiens
gacgcaaaccgcggcagaaaccccaaggccgagaagggaagcaaggaccagaagcgccaacgcaagcag

SEQ ID NO: 258438 - RNA, 98 nt, Homo sapiens
aagggcagaagcgcaggggagaggagagaaaaagaacccggagaaacgaagcgggacggaggggcaacagacaagcacccagccagaaggaagcacag

SEQ ID NO: 258439 - RNA, 85 nt, Homo sapiens; identical to SEQ ID NO: 78016

SEQ ID NO: 258440 - RNA, 63 nt, Homo sapiens
cccaccaacagaaacagacccaaacacgaggaagcggcccggagaaacaagaaggaaagacga

SEQ ID NO: 258441 - RNA, 70 nt, Homo sapiens
acacaggacgcggacaagggcggcagaaaggaacccaaagcacaaaggcggaggcgggcccaacgccagc

SEQ ID NO: 258442 - RNA, 80 nt, Homo sapiens
gagcaggagaagcgagcccggacagaccaaccgcaggcgcaagcacagccagggcgaaagaagaccccgccaccggcccc

SEQ ID NO: 258443 - RNA, 89 nt, Homo sapiens
cggcaagacagaaaacaccgagcacacaggaccagaacagcgcaggagcacagagaaaggaagaggacagaagcagcacacacagggga

SEQ ID NO: 258444 - RNA, 50 nt, Homo sapiens
caagcgaaaaaaaacaaaggcccaggcaacagggcaacaacacggcacca

SEQ ID NO: 258445 - RNA, 50 nt, Homo sapiens
aacagccaccggaggacaggacaagagaaaaaaagggcgggcgaacaaaa

SEQ ID NO: 258446 - RNA, 82 nt, Homo sapiens
cacagaacaacagaagaggagagaggaacccgaagaagaaaggacgacagccagagaggccaggaaagaaagaagacaaaag

SEQ ID NO: 258447 - RNA, 76 nt, Homo sapiens; identical to SEQ ID NO: 1266

SEQ ID NO: 258448 - RNA, 75 nt, Homo sapiens
cgggaagcgggagcaggggggaacccaccaggagagagaggcggaagggccaggaaacagaggccagcaggggag

SEQ ID NO: 258449 - RNA, 87 nt, Homo sapiens
cacccgccagccgacgaaggggagccacaggagagcgcccagacgaacaggaggcagaaccaacagaacgacggggcccccagagaa

SEQ ID NO: 258450 - RNA, 67 nt, Homo sapiens; identical to SEQ ID NO: 40531

SEQ ID NO: 258451 - RNA, 78 nt, Homo sapiens
cagaccaaaaacgcaacaacagacgcccggacagaggcacaggaagacaacagcacaagaaaggcccaacgaggaaag

SEQ ID NO: 258452 - RNA, 73 nt, Homo sapiens
acccagaaggggaggcggcacaggccggcggggcccggaaacacaacccagaaaggggaaagaccaacgggag

SEQ ID NO: 258453 - RNA, 80 nt, Homo sapiens
gccagccacgcgcgcccacgcaggagcaccacaacagggccccgcggacgccgggccgcgggagagccgggaggagacgc

SEQ ID NO: 258454 - RNA, 77 nt, Homo sapiens; identical to SEQ ID NO: 254294

SEQ ID NO: 258455 - RNA, 70 nt, Homo sapiens
acaaagagcagacaagagaaaaagggagaagaccacaggggggcggaccccgggggaaacccgggaagca

SEQ ID NO: 258456 - RNA, 125 nt, Homo sapiens; identical to SEQ ID NO: 185865

SEQ ID NO: 258457 - RNA, 75 nt, Homo sapiens
acaagaaagagaagagcagcaagagcaccacaaccacacagccaaaaagaaaaccagcaagaagcgacaaaaaag

SEQ ID NO: 258458 - RNA, 80 nt, Homo sapiens; identical to SEQ ID NO: 237268

SEQ ID NO: 258459 - RNA, 67 nt, Homo sapiens
gggcagcgaaagaaaaggggggcccagacccaagaaaggagaaggagaaaggaggaaaaggaagcac

SEQ ID NO: 258460 - RNA, 76 nt, Homo sapiens
gccggccacgcaccgagccgcgcggccagcccaaaaccggaaaaccagcaacaggacagcacacgaccaggaacga

SEQ ID NO: 258461 - RNA, 86 nt, Homo sapiens; identical to SEQ ID NO: 9238

SEQ ID NO: 258462 - RNA, 126 nt, Homo sapiens
ggcggccggcggcggcgcgggcgagcggcgagccgaaaagcgagcgcgaggaaaaggcggcgggagggaaggagagcgccgagaggaaagcagagacggcagaaaagcgcacggggacgggagggg

SEQ ID NO: 258463 - RNA, 63 nt, Homo sapiens
gagagaagagccaggacgaggagcccgggggaaccacgagaaccgacaaacgaaacaagcccc

SEQ ID NO: 258464 - RNA, 51 nt, Homo sapiens
ggcaaacaaaccgccaacgaacagaacagagcagaaagacacaaccgcagg

SEQ ID NO: 258465 - RNA, 79 nt, Homo sapiens
agggggagcgaggcgacagaacacagaacacacaagggggaggagccaagagggcccgaggaaaaaggaacggaccaga

SEQ ID NO: 258466 - RNA, 96 nt, Homo sapiens
ccgaaaagcgagcgcgaggaaaaggcggcgggaggcaccagcaccccggaacccagaggcccgcgccgaagggaccccccggggaggaaggcgagg

SEQ ID NO: 258467 - RNA, 75 nt, Homo sapiens
ggaaagccaacgcgggagggacccacagccccacccgcacaaacacccaggaaaggcccagaaccgggacaaccc

SEQ ID NO: 258468 - RNA, 42 nt, Homo sapiens
cccgccgccagcgggccgcaggcacgcgacggcaaaaggagg

SEQ ID NO: 258469 - RNA, 72 nt, Homo sapiens
gaggcgggcagaggagccagaagggggaagcccaagaaaggaagcacgcgcgcggacaagaccagaaagaaa

SEQ ID NO: 258470 - RNA, 74 nt, Homo sapiens
caaagacaagaggagacacgagggaacaaacaccggagcacccgaaccaacagcaggcaaagagacaggacgac

SEQ ID NO: 258471 - RNA, 81 nt, Homo sapiens; identical to SEQ ID NO: 43161

SEQ ID NO: 258472 - RNA, 74 nt, Homo sapiens
cagaaggccaaaaaggcaaccacagagagagagagggagggacaccgagacggcggaacaggaaaagcaacaac

SEQ ID NO: 258473 - RNA, 65 nt, Homo sapiens; identical to SEQ ID NO: 232756

SEQ ID NO: 258474 - RNA, 76 nt, Homo sapiens
ccccagcagggccagacccgggccacgcgccccgcagcccggcagcggcgccaagagaagagacgggaacgacaaa

SEQ ID NO: 258475 - RNA, 32 nt, Homo sapiens; identical to SEQ ID NO: 95570

SEQ ID NO: 258476 - RNA, 122 nt, Homo sapiens; identical to SEQ ID NO: 218479

SEQ ID NO: 258477 - RNA, 43 nt, Homo sapiens
gaagccgagggagcgcgagcgacagagaacgcgccacccaccc

SEQ ID NO: 258478 - RNA, 73 nt, Homo sapiens; identical to SEQ ID NO: 49219

SEQ ID NO: 258479 - RNA, 47 nt, Homo sapiens
ccgcacaacgcggagcggaagaggggaaacacaccaaggcggagcgg

SEQ ID NO: 258480 - RNA, 71 nt, Homo sapiens
aagacggaacaaccccagaccaagagagcagaagagacaaaaaggaacgaagccgccgccgcagaaccagc

SEQ ID NO: 258481 - RNA, 35 nt, Homo sapiens
gcgcgccgccgccgaggagaaaggcgcgagagcgc

SEQ ID NO: 258482 - RNA, 80 nt, Homo sapiens
ccagcggggcgagagggggcaggggcagccgccagcccaaacaggcggcacagggcccgaaaaaaacccccggcggccag

SEQ ID NO: 258483 - RNA, 77 nt, Homo sapiens
aacaaagagccgccacaaaagaggcaacaccgcagcagcaaacacggacccgccagacgggcaacaacagacaccag

SEQ ID NO: 258484 - RNA, 81 nt, Homo sapiens
gaccggaccagccagaggacgcgggccgaggagagcggaggaggggagccacacacagacacaaaaggaacgaagaagagg

SEQ ID NO: 258485 - RNA, 74 nt, Homo sapiens
gagcgccagaaacacgagaccaccgcggagccggagcgaggcgggggaggcagcagaagcccgcccccgagagc

SEQ ID NO: 258486 - RNA, 80 nt, Homo sapiens; identical to SEQ ID NO: 165253

SEQ ID NO: 258487 - RNA, 45 nt, Homo sapiens
ggggacccacacacgaaaaaccagaaaccgaaaagaagcagagaa

SEQ ID NO: 258488 - RNA, 83 nt, Homo sapiens; identical to SEQ ID NO: 147180

SEQ ID NO: 258489 - RNA, 104 nt, Homo sapiens; identical to SEQ ID NO: 41122

SEQ ID NO: 258490 - RNA, 70 nt, Homo sapiens
aaagaggagggaaaaaaacaacagccacaccaagaaaaaccgggagaagcggacagcaagaagcacccaa

SEQ ID NO: 258491 - RNA, 69 nt, Homo sapiens
gcccccgcccccccgggcaggaagacaaaaacaggagcggaaacccaggagcgaaaaagacaacacgag

SEQ ID NO: 258492 - RNA, 110 nt, Homo sapiens; identical to SEQ ID NO: 45189

SEQ ID NO: 258493 - RNA, 72 nt, Homo sapiens
gaaaacaagccaaggagaacccagcccgacggggaaaaggcaacggacacaggacaccacgggagagcgaac

SEQ ID NO: 258494 - RNA, 69 nt, Homo sapiens
gaagaccccacagcggggccacagcaagcccaggcaggcaaagggaaagaaacccaaaccaagccgaga

SEQ ID NO: 258495 - RNA, 62 nt, Homo sapiens
caagacccccccaggaccccagagccagacgggccgggacgcccagagagaccagccccaac

SEQ ID NO: 258496 - RNA, 123 nt, Homo sapiens; identical to SEQ ID NO: 119895

SEQ ID NO: 258497 - RNA, 52 nt, Homo sapiens
gaacccgcaccccgacccacagaacgagagcgagaccacagagacacggcgg

SEQ ID NO: 258498 - RNA, 70 nt, Homo sapiens
gaggcagagcccaggaacaggcagcgagacagggaaacgggaggcggagccagacacgcagaccaagacc

SEQ ID NO: 258499 - RNA, 61 nt, Homo sapiens
gcccaaccaccgacaaggcccccagaccccggggcgcaagcgagccagcccggccggcgac

SEQ ID NO: 258500 - RNA, 68 nt, Homo sapiens
gagaagcacagggaagccacagcagagaaggaagagacagcaggcccaaggaagcgggaggaggaagg

SEQ ID NO: 258501 - RNA, 73 nt, Homo sapiens
caggaagcaaagaaaaacaacagaacaaaggaagagaggcccgaaccacacagacaccagacaggacggagaa

SEQ ID NO: 258502 - RNA, 72 nt, Homo sapiens; identical to SEQ ID NO: 5720

SEQ ID NO: 258503 - RNA, 76 nt, Homo sapiens
agacgggaaggccaaacgaaaaacagacaaggaacagacaggaggcgaaacgagagaccagagagcgcaaaaccac

SEQ ID NO: 258504 - RNA, 97 nt, Homo sapiens; identical to SEQ ID NO: 34940

SEQ ID NO: 258505 - RNA, 71 nt, Homo sapiens
gggagggagagcccacgacagaacgaaaagaaaggaccccagccccccaggcccaaaccaaagcaccaccc

SEQ ID NO: 258506 - RNA, 76 nt, Homo sapiens
ccacaaaaaccacgagagcccgcccaacaaacagaggacaggggagcaggcgaagcgagccagggaagcgaaccag

SEQ ID NO: 258507 - RNA, 73 nt, Homo sapiens
cccgagaaggacgcaaaggagcccaacaggaggaacccagcccggcaggcggacccacccacaggaaagggga

SEQ ID NO: 258508 - RNA, 70 nt, Homo sapiens
agcagacacgaacaagccgagcgaccacccaggggagaaggaagagcaaggagcaaaccaagacggccaa

SEQ ID NO: 258509 - RNA, 72 nt, Homo sapiens
accaaaccagaaaagaacagaaggccaggaacgggaggcaagaagaagaaagcaaagaacagccaacaaaag

SEQ ID NO: 258510 - RNA, 81 nt, Homo sapiens
ccaagaccccagaagggagggcaagaagaagaaccgagcccagcaagacccccagcgccgaacgcaaggcggggaaaaaaa

SEQ ID NO: 258511 - RNA, 58 nt, Homo sapiens
aaagaggaaggaacggaaaagaaaagccgaaccaccacagaacgaggaggaaaacgac

SEQ ID NO: 258512 - RNA, 115 nt, Homo sapiens
caaggcagacacaccgaaaaggcgggcagccaaggcaggcgagaagaccaccgggccacagaccgggggccgggggaccggggcccccccgggcccggccccggccagggcgggg

SEQ ID NO: 258513 - RNA, 80 nt, Homo sapiens
ggagaccgcgggccaccccggcgggagcgcaggggcccgcagcgaaccaacgggcccaaccagaggaagcaaaaagcaga

SEQ ID NO: 258514 - RNA, 79 nt, Homo sapiens; identical to SEQ ID NO: 115770

SEQ ID NO: 258515 - RNA, 78 nt, Homo sapiens
aggccggaggacaccaacagcacgaaacaaagcaggacaaggcggacccaggcgcccggaaggagaagcagcgggcac

SEQ ID NO: 258516 - RNA, 72 nt, Homo sapiens
gcaagcagcacaccgaaaccaggggccccaggacgcggagaaaggcccgaagcaaacaacgccagcgggacg

SEQ ID NO: 258517 - RNA, 59 nt, Homo sapiens; identical to SEQ ID NO: 76699

SEQ ID NO: 258518 - RNA, 79 nt, Homo sapiens
ggcaggagccgaaagggaagcacacggaccagcagaacagaaacaaggaaaaagaagaccaccggacagcacggagaaa

SEQ ID NO: 258519 - RNA, 66 nt, Homo sapiens
ccggaacacgcagaacaacagaccaacaacagaaccaagggagggaaagggcaaaaagagcggaaa

SEQ ID NO: 258520 - RNA, 90 nt, Homo sapiens; identical to SEQ ID NO: 152156

SEQ ID NO: 258521 - RNA, 77 nt, Homo sapiens
caacccgaggaagcccggaaaaaagggaaggacacggacacagcaagaggcccaaacgaaccgcggcccagagaggc

SEQ ID NO: 258522 - RNA, 44 nt, Homo sapiens
ggcccggaccggacgcgggaggggggacaggcacggcccagacc

SEQ ID NO: 258523 - RNA, 98 nt, Homo sapiens
ggccgaaagaacgcccggagagccaaaggacggacgagcgcgggcaacaagcccaaaaacccagaacagaagacaaagagaggagccgaaggagaagc

SEQ ID NO: 258524 - RNA, 39 nt, Homo sapiens
aaagaggagaagccggaaacagggacaccaaaacgagaa

SEQ ID NO: 258525 - RNA, 82 nt, Homo sapiens
cgaaggaccgccccgccagaaacgaggagaggcggagcggaggagaaaacgaaaggacacagaaagaaacagaagaacaaag

SEQ ID NO: 258526 - RNA, 78 nt, Homo sapiens
cgggccaccacggggagaaggacaagccaccaaggcccggcgacccagcaccaccaccggcgggcccccgacccaagc

SEQ ID NO: 258527 - RNA, 73 nt, Homo sapiens
cggacagccagaaaaaaggccggcgaagaagcaaccagaaagagcagaggcagagcggcagaacagagaaaga

SEQ ID NO: 258528 - RNA, 90 nt, Homo sapiens
gcagaaagcaggcgaacccgcggcgcaaaacggaacaagcagaaagcacgaacaacgagaacaagacacgagcaaaccccaccgaggggc

SEQ ID NO: 258529 - RNA, 69 nt, Homo sapiens
agacaccaggcggaagagaaaggagagaagcccaaaagacaaagggcagacacgagaggcccacgcaag

SEQ ID NO: 258530 - RNA, 76 nt, Homo sapiens
caaccccagaaccccaccaggcaaggccccacccagccggccgggcgcgaaacggagagaccacccggcccccacc

SEQ ID NO: 258531 - RNA, 73 nt, Homo sapiens
cagggaggacagagaccgaggagggaggcgagaacaaaaccaaagaagaaaccacaacgggaagaagaaacac

SEQ ID NO: 258532 - RNA, 58 nt, Homo sapiens; identical to SEQ ID NO: 127111

SEQ ID NO: 258533 - RNA, 76 nt, Homo sapiens
agacagcgaggagcagcagcagcccagcaggcgcggcccgccagaaagaagacggaagaggaaaggcacacagaaa

SEQ ID NO: 258534 - RNA, 70 nt, Homo sapiens
cacagaagaaaacaaacagcaaccaaaaccgacggcggccacaggccaggaaagggacaccccaggcggg

SEQ ID NO: 258535 - RNA, 79 nt, Homo sapiens
cagaggaggagaccgggacagagagaggagcaagaggacccgcggacacgcaaagggaagcggcaagagacccaaaacc

SEQ ID NO: 258536 - RNA, 82 nt, Homo sapiens
agcagcaccgcagggagagcaggagagcggcaggcaagggcggggccccacccacacccggggaggcggccagaacacacgc

SEQ ID NO: 258537 - RNA, 73 nt, Homo sapiens
aagggagagagcaggaagcgaacgcccaagcaaaaacagggacagacaaaaccgccccacccaccaccaagag

SEQ ID NO: 258538 - RNA, 52 nt, Homo sapiens
ccagccagagcgaggcgaaacgaggccagcgcagggggcagcacaggaaacc

SEQ ID NO: 258539 - RNA, 81 nt, Homo sapiens
aggagagcgacaggacaaagccacaaggccggagacccggacaaggcaagcccagcacccaccggggaggacaggcccaaa

SEQ ID NO: 258540 - RNA, 74 nt, Homo sapiens
ggccccccagcaaggcccaccggaccaggcggacagcaacgaccggaaaccacaaagcaaagacaggacccagc

SEQ ID NO: 258541 - RNA, 125 nt, Homo sapiens; identical to SEQ ID NO: 19930

SEQ ID NO: 258542 - RNA, 80 nt, Homo sapiens
gaagagaagcagagcgcaacagaacccacagaaaaccacacagggcaggagaagagaagggggacagcaggaccacacgg

SEQ ID NO: 258543 - RNA, 68 nt, Homo sapiens; identical to SEQ ID NO: 131108

SEQ ID NO: 258544 - RNA, 79 nt, Homo sapiens; identical to SEQ ID NO: 9827

SEQ ID NO: 258545 - RNA, 76 nt, Homo sapiens
gccgggagacaacgccaacccaaggaaggaccaaacggagaaccagggagcccacccagaggcagggggcgacccg

SEQ ID NO: 258546 - RNA, 76 nt, Homo sapiens
ggccagccgaccggaacgaagggaccaccacggcaagaagcaggacagaagaaggggggaccccaagcgcgaggga

SEQ ID NO: 258547 - RNA, 55 nt, Homo sapiens
aagcaggcaaccccaggcaagaccccaggcccagaacacacggacacgcacacca

SEQ ID NO: 258548 - RNA, 40 nt, Homo sapiens
gagaaagggaaccaaccaaacaaggccaagccgacgccag

SEQ ID NO: 258549 - RNA, 101 nt, Homo sapiens
aagcaccggaagaccccgaaggaaaaggaggaacgccggcccgagaaagcccgccagcaggaagggcgaaagaggaagaagaaagacaaagagagcgaaag

SEQ ID NO: 258550 - RNA, 78 nt, Homo sapiens
acaaggccggaaggaagggaaaccgggggccccggacaacccgagcagggagggagcggcgggaccgggcgcagacgg

SEQ ID NO: 258551 - RNA, 82 nt, Homo sapiens
ccaagaggaagggagggccgacgggaccgaaggcagaccccaaggcacggaggccccagcccaacccagcccaggaggagga

SEQ ID NO: 258552 - RNA, 79 nt, Homo sapiens
gcggacaggacggaagccgcgaacccccgaccgggagcccacggacagacagagcgcccgccgagagcaggagcccaaa

SEQ ID NO: 258553 - RNA, 86 nt, Homo sapiens
gcaagcccagcaccaggcacaggcagaacaaccgcacagggccccaagcagagggcagagggagcccagcccaagccaagaacgac

SEQ ID NO: 258554 - RNA, 50 nt, Homo sapiens; identical to SEQ ID NO: 119048

SEQ ID NO: 258555 - RNA, 74 nt, Homo sapiens
ccacaccagcggacggcgagggccccccgccggacaacacagagaaccggaaagaacaagccaccaaaaagaag

SEQ ID NO: 258556 - RNA, 70 nt, Homo sapiens; identical to SEQ ID NO: 185590

SEQ ID NO: 258557 - RNA, 72 nt, Homo sapiens
gacgcgagagacgcaagacgaacaggaacagagaagcgcccccagggaggccgaacacacagcgagaacacg

SEQ ID NO: 258558 - RNA, 88 nt, Homo sapiens
gagacccgaccagcgggggcgcggcggccgcgcagccacccaagagggccaagagggcgccgagccaacaggagcagcgcaggccgag

SEQ ID NO: 258559 - RNA, 67 nt, Homo sapiens
gcgagggcacagacggacaacaggaaaaacccagccagaaagacaacgaaacggcaaaccgagccac

SEQ ID NO: 258560 - RNA, 51 nt, Homo sapiens
ggccacccccccgcgccgccggcacgcgggacacgcgacgacaagcaggag

SEQ ID NO: 258561 - RNA, 76 nt, Homo sapiens
agggaaaaagcccaggacgacagggaggcgaagcaacaaaggccaggggcagcaccccaccagccaccccccacgc

SEQ ID NO: 258562 - RNA, 66 nt, Homo sapiens
gcccgcacagccgagccccagcggaaccagagcgcgcgacaaccacacaaaaaagcacagcccagg

SEQ ID NO: 258563 - RNA, 62 nt, Homo sapiens
gacaagccaaggccgcgaggaagggcacaccgaaacaagaagcgaaacgaggaaaaaagaaa

SEQ ID NO: 258564 - RNA, 38 nt, Homo sapiens
ggacgcggaccagggggacgaacggggaagaagcagcc

SEQ ID NO: 258565 - RNA, 83 nt, Homo sapiens
gccagccaggaaaaaccaccacaggcacgacgcccgagggagcagaaccaaaaagcgccaagcagccagcgaaaacagcacag

SEQ ID NO: 258566 - RNA, 82 nt, Homo sapiens; identical to SEQ ID NO: 222570

SEQ ID NO: 258567 - RNA, 71 nt, Homo sapiens
gagcccagaaggcggcgaccgggcgcgggcaaggcgggaaccgagcccgcaagagacggcagccccgcgac

SEQ ID NO: 258568 - RNA, 74 nt, Homo sapiens; identical to SEQ ID NO: 227837

SEQ ID NO: 258569 - RNA, 64 nt, Homo sapiens
agcggcgacagggcgggacacgacaggacagggaccacccacacagaggacccacgaacgcaac

SEQ ID NO: 258570 - RNA, 76 nt, Homo sapiens
ggaaaacgacagggagaacggcccaagccaagggccacgggggaccgcagggaggccagcagggggggagagaaga

SEQ ID NO: 258571 - RNA, 89 nt, Homo sapiens
cgggcgacgacgaggaggaggcggccgccgcagccggggcccccgccgccgccggagcgaaacagagaagcgagaaagagaagaagaac

SEQ ID NO: 258572 - RNA, 105 nt, Homo sapiens
agaccagacaggggaaggagagacagagagggaagggaaacaaaaggaaagagaggcgacgagcgacagaagaaaaagagagggagagcagcagcgcgagccagc

SEQ ID NO: 258573 - RNA, 100 nt, Homo sapiens
gcggagcgcagaagcggcccggccgcccgccagcggccaagaagcccgcccagggaccaagaaaggcccagggaccaaagcccggacaaggcccgagcac

SEQ ID NO: 258574 - RNA, 68 nt, Homo sapiens
gaaccggcccagagcacagaagacagggccacccagggaaacaccacagagggagggcgggcagccgc

SEQ ID NO: 258575 - RNA, 69 nt, Homo sapiens
gacagcccacacccggcgcggagggagaaccagccaaaaaagggcagaaccgacaacggggacccgcgc

SEQ ID NO: 258576 - RNA, 74 nt, Homo sapiens
cggaaccccagagcacgagagagcaagagagccaagaggacaccagaaaccagaagggacgaggcgaaaacaac

SEQ ID NO: 258577 - RNA, 78 nt, Homo sapiens
ggacggaggagcaggcgagaagagaaggcaagagggcagagcgccggcacaaccaacaggcccgcacccaggcccccc

SEQ ID NO: 258578 - RNA, 61 nt, Homo sapiens; identical to SEQ ID NO: 118042

SEQ ID NO: 258579 - RNA, 119 nt, Homo sapiens
aggggggcacgcgacgcacagaggaacacgccggggcccaaccacaagacgaccaaaggaggaagcggcaaccggcacgcaccagagcagcccacaggacggcacccgccccacagccc

SEQ ID NO: 258580 - RNA, 77 nt, Homo sapiens
aggccacacgggcggggagcgcccacgccaaagagccccgcgacaagagaagcaccagaagacgcagggcgcccgac

SEQ ID NO: 258581 - RNA, 74 nt, Homo sapiens
gaaaggaaagcagcccgaaaagaaggcaacgcccaacaagggccggcgaccagggcagaagacccgagagcccc

SEQ ID NO: 258582 - RNA, 62 nt, Homo sapiens
agccacaaaggcaacccggacccggaccacaagcacgagagcaaaccaggggacagggaaag

SEQ ID NO: 258583 - RNA, 97 nt, Homo sapiens
cccagcacgcgcagggacaggagacccacagaggaaaacaaccccggggccacaaagcgagccggaagggaaaaagcggccagagcgccacccccgg

SEQ ID NO: 258584 - RNA, 78 nt, Homo sapiens
gccgggaccgcaggcccggaaggccagggaggaccccagacaccggagacgggaaaggagccggcacagaaaacaccc

SEQ ID NO: 258585 - RNA, 88 nt, Homo sapiens
aagcacagagcccacgcaagacagggcgcaggagacccaccaacaggaacggaaacaaggagcaaagcacggggaggagagcgaggac

SEQ ID NO: 258586 - RNA, 79 nt, Homo sapiens
agcgcacacagcgggagcaggagcggaggaggaaccccccccagacacgccacgcaaaggcgggacaccaaaggcagag

SEQ ID NO: 258587 - RNA, 77 nt, Homo sapiens
gggcccagaccagaaaggaaggccaaaaaagcaccagacagccgagagaaccagccccgagcaaagccggcgggccc

SEQ ID NO: 258588 - RNA, 75 nt, Homo sapiens
gagagcagcgaccggcacaccagcaagagcgaggagacagacgaaacgcaagaaagaaagcaagcgaaacaagaa

SEQ ID NO: 258589 - RNA, 58 nt, Homo sapiens
gccaggcgaggagagcgaacaaccccagaagagccccgccgcacgcaggcggaagcag

SEQ ID NO: 258590 - RNA, 66 nt, Homo sapiens; identical to SEQ ID NO: 172330

SEQ ID NO: 258591 - RNA, 73 nt, Homo sapiens
ggggccgggaggcggagaaaagggacacggcgccccacacccccgcaccgaccccaccagccacgagggacgc

SEQ ID NO: 258592 - RNA, 69 nt, Homo sapiens
gcccggaggggagagagcggaggacagccgagaggaggacaaggcacgaggcgcggcgaccaccacagc

SEQ ID NO: 258593 - RNA, 77 nt, Homo sapiens
gaggcccggcggcgcgcccaaccggcgacggaaccaaggccagccagccggggacaaagcggcgaaacaaaagcgcc

SEQ ID NO: 258594 - RNA, 118 nt, Homo sapiens
aaaaaagaaccagacagcagagagagagcggaacgggagaaagcacgggaggagaggacccagagagggaccagggccaaagaagagccggggggcaggcggacagcaagcgcaggga

SEQ ID NO: 258595 - RNA, 84 nt, Homo sapiens; identical to SEQ ID NO: 160304

SEQ ID NO: 258596 - RNA, 74 nt, Homo sapiens; identical to SEQ ID NO: 224694

SEQ ID NO: 258597 - RNA, 97 nt, Homo sapiens
ggccgagcaaaagggacacacaccagggggcacccggccgggggacaggaacagagccgcccgagggcacagaagaaaggaaagagccacaaggacc

SEQ ID NO: 258598 - RNA, 83 nt, Homo sapiens
cggggagaggaccaggaggggcccggagcccagcgccgcgcagcgcgggcgcagccacccgggaacgcacacggagaggaggg

SEQ ID NO: 258599 - RNA, 71 nt, Homo sapiens
cccgagacgggcccgccgaaaggcgaccagacaagccagcgaaaccagccccaagcgcagggcgaacaaac

SEQ ID NO: 258600 - RNA, 74 nt, Homo sapiens; identical to SEQ ID NO: 208460

SEQ ID NO: 258601 - RNA, 46 nt, Homo sapiens
caaagagagccgacaacaagaacgcacacgagggcccaaaacacgg

SEQ ID NO: 258602 - RNA, 79 nt, Homo sapiens
cagacggccagccgagcggccggacacagccaggacagaaacccaacgccaaagggggacccgcaggcccgacgcaggg

SEQ ID NO: 258603 - RNA, 107 nt, Homo sapiens
ccgcccggggcagcagcggccccgcgcacgccgagccacccagcggcggcggcggccagcagggcacaaaaccgccccagccaggaggcagcagccaaggaaagcca

SEQ ID NO: 258604 - RNA, 63 nt, Homo sapiens; identical to SEQ ID NO: 36071

SEQ ID NO: 258605 - RNA, 39 nt, Homo sapiens
gagagcagcacaaagcaaggggagcgacgccccaccaca

SEQ ID NO: 258606 - RNA, 77 nt, Homo sapiens; identical to SEQ ID NO: 33107

SEQ ID NO: 258607 - RNA, 78 nt, Homo sapiens
acgaaccagccaccaggcaagacaaggaaacccagcggcggcagaaccagccggcacaaagccgaaccagagagagca

SEQ ID NO: 258608 - RNA, 36 nt, Homo sapiens
gccggacgacaccccacagcacgagaaccgccggcg

SEQ ID NO: 258609 - RNA, 76 nt, Homo sapiens
acgggagaaaacccggaaagccaaacggaacaaaaccgaaccaacaccacacaaacccgacgccaccacgggaagg

SEQ ID NO: 258610 - RNA, 83 nt, Homo sapiens; identical to SEQ ID NO: 248954

SEQ ID NO: 258611 - RNA, 77 nt, Homo sapiens
cccgacacggggcgacacagcggccgagagacagggcgaagacaggacggcccaggcagacacggaggaggaggaag

SEQ ID NO: 258612 - RNA, 30 nt, Homo sapiens; identical to SEQ ID NO: 258056

SEQ ID NO: 258613 - RNA, 84 nt, Homo sapiens; identical to SEQ ID NO: 242931

SEQ ID NO: 258614 - RNA, 62 nt, Homo sapiens
gccccagcgccaccgccgaccgaagccgcaaaaccaggaagaggcgcccccgcccgccagac

SEQ ID NO: 258615 - RNA, 110 nt, Homo sapiens
caaaaggcaacgcagccagcaacgggaacggccacagcaagaagcggagacagagaacacgaagagagggccggcacccgccggaaccgagcaacgcgagcagaagccca

SEQ ID NO: 258616 - RNA, 96 nt, Homo sapiens
cggcaagagggcgaacaacacggcaacgggacggcgacagcccgcaccagggacccagcagaacaacccacagagccagccggcccccaccaccgc

SEQ ID NO: 258617 - RNA, 65 nt, Homo sapiens; identical to SEQ ID NO: 208556

SEQ ID NO: 258618 - RNA, 76 nt, Homo sapiens
ggaccccaaggcaggggagagccccacgaggcgggcagcaccgcaccagagagcggcgcgcggcaagcaagaggag

SEQ ID NO: 258619 - RNA, 65 nt, Homo sapiens
cgcgcccggggggcacccaagcgaggacgcggagaagcaacggggcaacagaggggcacaaacgg

SEQ ID NO: 258620 - RNA, 75 nt, Homo sapiens
aacgaggaagaggaagacggcgacgaaccgagacgccaccgaaaaagccaaggcgaagccacagaaaggagagca

SEQ ID NO: 258621 - RNA, 105 nt, Homo sapiens
cggcgggcgcgcagacggagggccgcgccacaagcagcaggccaagaggaaccgccaccaagcgccacagcggccacgcgcgggggaggaccacccagaacccac

SEQ ID NO: 258622 - RNA, 37 nt, Homo sapiens
gaggccccaaagggcgaggcacggaaagaaagcaaaa

SEQ ID NO: 258623 - RNA, 44 nt, Homo sapiens
aggacggcgcagccccccccgcaggagaagaaacgaggcagaga

SEQ ID NO: 258624 - RNA, 75 nt, Homo sapiens
ccgaacggggccccccgcgcgagaaggaacgaaaggcaaaacacagcgaagcagccgaggacgcccaggcgaccc

SEQ ID NO: 258625 - RNA, 77 nt, Homo sapiens; identical to SEQ ID NO: 231965

SEQ ID NO: 258626 - RNA, 65 nt, Homo sapiens
ggggggagacgggaccagcaagccgagaaagggaggcggaacagggcccacggcggccacggggc

SEQ ID NO: 258627 - RNA, 74 nt, Homo sapiens
cagccaaagaaggcaacaggcccggaggagcggagagaaagacagcagcccccgccaaggacagcagcaacaaa

SEQ ID NO: 258628 - RNA, 112 nt, Homo sapiens
cccaagcgcgcaccgcggcgccgacacaaacgccaagggacggaccacgcccgcaccaggaacggagacagccagacacgagcacaaagcgcgggacgccaaacaagagcgc

SEQ ID NO: 258629 - RNA, 82 nt, Homo sapiens; identical to SEQ ID NO: 192697

SEQ ID NO: 258630 - RNA, 75 nt, Homo sapiens
gcaccaggagaccgagaagaaaagaaaaaacaccaagcacccagcaggcaagaagaagaagagagacagaaaaga

SEQ ID NO: 258631 - RNA, 112 nt, Homo sapiens
gagaaacccgaacagagaacaagacccagcgaccagcaaaccggacgaagccaagcccagcgacaagcgcccccccccaagaccaccccgaagaagagcggagaacccccgc

SEQ ID NO: 258632 - RNA, 73 nt, Homo sapiens
gcaaccacagaaggaaaagcacgacccgaaggccagcagaggagcagcaggcacaagaaaaccacagggaaac

SEQ ID NO: 258633 - RNA, 78 nt, Homo sapiens
aagaaaccgcgagaggagaagcacaagacagcgaaggaggagagaaccgaacacccaacaagaaggcaacgacaaaca

SEQ ID NO: 258634 - RNA, 77 nt, Homo sapiens; identical to SEQ ID NO: 51496

SEQ ID NO: 258635 - RNA, 69 nt, Homo sapiens
ggccggaagagcagcaccggaccagcggagcggccgcagggggaagagcgcagccgaagaaacaccgag

SEQ ID NO: 258636 - RNA, 101 nt, Homo sapiens; identical to SEQ ID NO: 16004

SEQ ID NO: 258637 - RNA, 73 nt, Homo sapiens
agcgggacgggggccgcggcgcgcgggcacgcgccccagcccgggcggggagaacaggaacgggaaaaaccac

SEQ ID NO: 258638 - RNA, 39 nt, Homo sapiens
cgcaaccccaagcgcccaaaggggaccggaggcccgcgg

SEQ ID NO: 258639 - RNA, 76 nt, Homo sapiens; identical to SEQ ID NO: 37156

SEQ ID NO: 258640 - RNA, 86 nt, Homo sapiens
cccggcagcgcgccacagcccgcgaagccaacgaggcgggggagacagggaacgcgcgggcacgggggcagcggccgaccaacgag

SEQ ID NO: 258641 - RNA, 69 nt, Homo sapiens
cgaaagggaagcacacggaccagcagaacagaaacaagggaaaagagccagaagaagaaaaggcaagcc

SEQ ID NO: 258642 - RNA, 40 nt, Homo sapiens; identical to SEQ ID NO: 149249

SEQ ID NO: 258643 - RNA, 74 nt, Homo sapiens
gagagcgaccccgcccacacggcagagggacccgcaccgaggcggcgaaggccgccaggggcggggaacggacc

SEQ ID NO: 258644 - RNA, 74 nt, Homo sapiens; identical to SEQ ID NO: 86806

SEQ ID NO: 258645 - RNA, 68 nt, Homo sapiens
acagagaagcaagagcgcagagaacccgaaggaagagagaagacaaggggcccgggcgacacggagca

SEQ ID NO: 258646 - RNA, 121 nt, Homo sapiens
gccgacgggcggcccagccggcgccaaggggcggcgcgggagacgcggagggcgaggcggcgcggccgagaagaagcacagcggcgagcggagccggggaggcgcgcaccggaggacccgg

SEQ ID NO: 258647 - RNA, 70 nt, Homo sapiens
aaagaacgcagagcggagggggaccaccccaggaagaagacaacagaccgcaccgccaagagcccaggcc

SEQ ID NO: 258648 - RNA, 106 nt, Homo sapiens
gaagaaaaaaagaacgaacccaaaaggagccaggagaaaaaggacagggacaagagaaagaaaaccgcaacagggcgaggcagagaaaaaaacaacacaaagaagg

SEQ ID NO: 258649 - RNA, 81 nt, Homo sapiens; identical to SEQ ID NO: 106963

SEQ ID NO: 258650 - RNA, 40 nt, Homo sapiens
cccgagcccacaagggacggacaggggcaaggaggacgac

SEQ ID NO: 258651 - RNA, 75 nt, Homo sapiens; identical to SEQ ID NO: 107962

SEQ ID NO: 258652 - RNA, 92 nt, Homo sapiens
cgggacggaccgagaccggaccgagagcggaccgagagcgcgaaacgcacgagaaggccacaaaaaagccaggccaccacaaaggaaccagc

SEQ ID NO: 258653 - RNA, 95 nt, Homo sapiens
accacaagcaagcgaaggaggccagaagaccagaagcgacagcaaagcgaaaaagaccgcagggaaggccgccacgagacagaaaggagggaaca

SEQ ID NO: 258654 - RNA, 69 nt, Homo sapiens; identical to SEQ ID NO: 134276

SEQ ID NO: 258655 - RNA, 77 nt, Homo sapiens
gcgcgcgcgcccccagccccaagaaagccgggggccagagacgccaggaagacgaaaggcacgagcgagaccggaga

SEQ ID NO: 258656 - RNA, 50 nt, Homo sapiens
gaggagcggcgaagcgcggcgcaggccacacgggcgacagcggagaggcc

SEQ ID NO: 258657 - RNA, 77 nt, Homo sapiens
cgccgagggcggccagcaaaacaccaaccccccagggcggcagaacaggggcagcggcaaaaaaaggaaaagcaaga

SEQ ID NO: 258658 - RNA, 37 nt, Homo sapiens
gacggggaaagcggccagacccggaccagagccgccg

SEQ ID NO: 258659 - RNA, 99 nt, Homo sapiens; identical to SEQ ID NO: 30792

SEQ ID NO: 258660 - RNA, 66 nt, Homo sapiens
gcggacggcgcgcggcggcaggcacaggagccgccaggccggccgggagaaggcaagcccgcgaag

SEQ ID NO: 258661 - RNA, 41 nt, Homo sapiens
acacaaacccaggagcaccacgagaggaagcaggcagggaa

SEQ ID NO: 258662 - RNA, 42 nt, Homo sapiens
gagcgggcggcacgcacgcagcccgggcgggaggacaaggac

SEQ ID NO: 258663 - RNA, 121 nt, Homo sapiens
gcaccgcccgagagcggcccaggagcacgcaccccgcggcggggaaaggccgcaaccaagcccaggaccgacagcagaggagcgcaagaacggagaacaccgacggagaaaacaggagcgc

SEQ ID NO: 258664 - RNA, 78 nt, Homo sapiens
agcgacaggcccaggggcgagccacagcgaaagccgagacagcgccgggggacgagagcaggaccacacccccggacc

SEQ ID NO: 258665 - RNA, 101 nt, Homo sapiens; identical to SEQ ID NO: 113575

SEQ ID NO: 258666 - RNA, 113 nt, Homo sapiens
cagccaaagaaaacccacagacagagaagaggaaccgagcgcccagccagcccagcaaggcggaccgcgccccggcggaccccgcggccgggagggcagacggcaccggccgg

SEQ ID NO: 258667 - RNA, 69 nt, Homo sapiens; identical to SEQ ID NO: 165954

SEQ ID NO: 258668 - RNA, 67 nt, Homo sapiens
ggcagcgcaaaaaacagccaccgagcagccgagcgcgagggcgacgggacaaacacaggaaggaaca

SEQ ID NO: 258669 - RNA, 72 nt, Homo sapiens
gcggcgcccaggagcacccagggaagcacggcccaacgccggacagccaccaacgaacgagaaaagaacaaa

SEQ ID NO: 258670 - RNA, 76 nt, Homo sapiens; identical to SEQ ID NO: 42912

SEQ ID NO: 258671 - RNA, 68 nt, Homo sapiens; identical to SEQ ID NO: 32806

SEQ ID NO: 258672 - RNA, 72 nt, Homo sapiens
caccgggaaggcggggaggaggccccaaagggcgaggagaagaagcaggcacagaccccaagaagacccagc

SEQ ID NO: 258673 - RNA, 70 nt, Homo sapiens
agacccacgcagcaccaagcccagacgggcccggagacaggcagagcccccagacccccaaggacgacca

SEQ ID NO: 258674 - RNA, 44 nt, Homo sapiens
ggccaaacccaccaacacccagggagcgggaagcagcacaagcg

SEQ ID NO: 258675 - RNA, 108 nt, Homo sapiens
gagccaggaacgcgcagccccgagcgccgcggacgcgcacgagggacggggaaaggaggagaaacggcagggagggggcagggccacaggggcccccgggcggaccgg

SEQ ID NO: 258676 - RNA, 78 nt, Homo sapiens
gacgccggagcggccggagcgaggcacacaagcgcaccagccaaccgagagggcaaggaaacagccaaaaagaaaaac

SEQ ID NO: 258677 - RNA, 51 nt, Homo sapiens
caaacaggcaacaggcccaagcgaggaccaacaggaaggcaagaacaaagg

SEQ ID NO: 258678 - RNA, 60 nt, Homo sapiens
cagcgcagaggcccacaacaccgcagcgggccacacaaggacccaaacagcccaccaagg

SEQ ID NO: 258679 - RNA, 71 nt, Homo sapiens
gcagacagagggcagccccgccggccgcaggaaaccaaggcagggggaaagagggaacacaacaaagccga

SEQ ID NO: 258680 - RNA, 100 nt, Homo sapiens; identical to SEQ ID NO: 33686

SEQ ID NO: 258681 - RNA, 83 nt, Homo sapiens; identical to SEQ ID NO: 74311

SEQ ID NO: 258682 - RNA, 71 nt, Homo sapiens
ggggcagaacaaaaggaaaggcgccagccggcagaaggggaggggagccgcagccggcacaaaccgagccg

SEQ ID NO: 258683 - RNA, 81 nt, Homo sapiens
gcggagagcagagaggcagagcaagacgccggacacccacaaggagcagcggagcgagagaggaaggagagcggcggagga

SEQ ID NO: 258684 - RNA, 77 nt, Homo sapiens
gcagccgggagacaccgccaccgccagcggagcagcagcaggagagcccacagccagccgggcggacccccggccga

SEQ ID NO: 258685 - RNA, 84 nt, Homo sapiens
ggggacagcgccacccgagggcgaagcagccaaggaccaagcaccaagcagagaagacaggacggggacaggagggaaggcgga

SEQ ID NO: 258686 - RNA, 91 nt, Homo sapiens
cgaaagagaaacccggagggcgccgggcacaggaagccggagaaccgaaggaccgcggaccaggcggacagccccccgcagaccgcgcgac

SEQ ID NO: 258687 - RNA, 82 nt, Homo sapiens
ggggggaacccaccaggagagagaggcggaagcacccacggagcgagagagacccgcgaaaccgacccaagaaaaagaagaa

SEQ ID NO: 258688 - RNA, 97 nt, Homo sapiens
cgccggccgacggccggcgggcgggggccccgcgccgcggccgagcagcgggggcggaaaaacaaacgagccaccagcgcccacccaccaaggcgag

SEQ ID NO: 258689 - RNA, 74 nt, Homo sapiens
cccacaaagcagaagaagaggaaagacagaaccagccaacaaaaggagaaaacacccaaaggcgggagaaagac

SEQ ID NO: 258690 - RNA, 76 nt, Homo sapiens
cccacaaccccaccaaaaccacaaaacccggggcgcaaacgcggagcagcgagagccagaccgggagacgcagcag

SEQ ID NO: 258691 - RNA, 36 nt, Homo sapiens
gcggaaggagcacgaggaagcaccacgagaggacgc

SEQ ID NO: 258692 - RNA, 91 nt, Homo sapiens
aacagcaaaaccacacaccacaggaaaagcaggacaccaagcggcgagacgcaggagagaaccgacaacagcgcccagcgacacgaccagc

SEQ ID NO: 258693 - RNA, 104 nt, Homo sapiens
agagaccgcgagccgacaccagcgaccaaggcgagggcgaggaagcagccaaaagccccgagccccggccccaaagacccaaaacagagacaccccccagcccc

SEQ ID NO: 258694 - RNA, 110 nt, Homo sapiens; identical to SEQ ID NO: 37729

SEQ ID NO: 258695 - RNA, 76 nt, Homo sapiens
cggaccccagggcagaagaccggaaacagaacgccaagagaggaagggacacaaaaccaaacacgaaagggcaaac

SEQ ID NO: 258696 - RNA, 44 nt, Homo sapiens
gagcgcgacgagaaagcggaggccagccgcggcacaaagccaag

SEQ ID NO: 258697 - RNA, 44 nt, Homo sapiens
gcccgggcgggcgccgcgagccggacggacaacaggaagccaag

SEQ ID NO: 258698 - RNA, 92 nt, Homo sapiens
cccagccgcagcgccagcagcggacaggcacagacaaccagcggagcaacaccccgcaccgggaaccgcggaacccgcaggccacgcaccag

SEQ ID NO: 258699 - RNA, 55 nt, Homo sapiens
cacaccacgggcagcaacagagcacaagaacccacgggcgaagccgaggaaagcc

SEQ ID NO: 258700 - RNA, 78 nt, Homo sapiens
aagaagagagcccagagcaggaaacaagaacgaccaaaaccgcgaagcaagacaggacagcgagaagggggaaagaaa

SEQ ID NO: 258701 - RNA, 75 nt, Homo sapiens
cagagagcgcggccggaggacaggcggcggaagccccgcccaccaggccaacaaggacccaaggacaggggacca

SEQ ID NO: 258702 - RNA, 86 nt, Homo sapiens
ggcgaggaggggccccagcagcccccgaaggcccacaggacaggagagaaagacggagcccaggagaaacgccaaggccgcagcag

SEQ ID NO: 258703 - RNA, 74 nt, Homo sapiens
gcaagggcaggaacgcacagaaggcccaaggaagaggaacaccaagaacgggcaagaaaagagcacggaagaag

SEQ ID NO: 258704 - RNA, 82 nt, Homo sapiens
cgcgcgcgcccccgggcggaccagccccgagcgggacagcgcggcggggagcgacgaggccaggaaaccgacggcgcacagg

SEQ ID NO: 258705 - RNA, 74 nt, Homo sapiens
ccgccaagcgggaaagaacggggagcagcagcgagcagacaacgcgcaccaaccaccccccggccagagaggcc

SEQ ID NO: 258706 - RNA, 79 nt, Homo sapiens
ccggggacgacaaggaggacggcaccgacgagagggcgcaccgcgccggagcccgaccgcggggacccggagcccggcc

SEQ ID NO: 258707 - RNA, 74 nt, Homo sapiens
ccggacccaaccagagaaagacaaccaaccccaccgaggaggacagagacgcaaacaacacacacgcacaagcg

SEQ ID NO: 258708 - RNA, 82 nt, Homo sapiens
gggcagccggccacggagcgccgcagcggcagaccggccagcaacccgcaccaggcaacgcagcagcagcagcagcagcagc

SEQ ID NO: 258709 - RNA, 67 nt, Homo sapiens
gacgcaagaaccagcggccgggaagcaagacccaaccagagccgcaacagcgcaagaccacggggga

SEQ ID NO: 258710 - RNA, 73 nt, Homo sapiens
cgagggcaggggaacccaggcaggaacgcaggcccgccgaaacccacaaagaaaccaagagaggacaacaaag

SEQ ID NO: 258711 - RNA, 74 nt, Homo sapiens
aggccggcccccagcggggggggaccggcagggaagggagcaccggagaggaaagagacgcccaaccacagggc

SEQ ID NO: 258712 - RNA, 82 nt, Homo sapiens; identical to SEQ ID NO: 247606

SEQ ID NO: 258713 - RNA, 71 nt, Homo sapiens
cggccccacccaaggacgcgccgacagaagaggccgggagcccggcaaaacaaaacgaaaagcaggcgagc

SEQ ID NO: 258714 - RNA, 73 nt, Homo sapiens; identical to SEQ ID NO: 37832

SEQ ID NO: 258715 - RNA, 51 nt, Homo sapiens
agaaggggggccaccccaacgccaagggaagaaagagccaaacaggcgaga

SEQ ID NO: 258716 - RNA, 115 nt, Homo sapiens
caccaagcagcagccaggaaccgggagaagccgcacccaccgaccccaggacgggcaccaggcaagcacacgcaagaagccaaagacagaggagggacccagagacacagcaaag

SEQ ID NO: 258717 - RNA, 98 nt, Homo sapiens
ggcaggccccgcaggccacccaggcccggaggcagcgcaggaagggaaaaggccgaggcacagcgggaagaccgcaaagacgacccgagacagggaac

SEQ ID NO: 258718 - RNA, 76 nt, Homo sapiens
ccaagagcagccagggcaggggaggcgggaaacaggagaggagaccggaaggccccacgacccaacaggcaaaagc

SEQ ID NO: 258719 - RNA, 66 nt, Homo sapiens; identical to SEQ ID NO: 146915

SEQ ID NO: 258720 - RNA, 76 nt, Homo sapiens
gaggacagagcaccaccaggccagcacaaaggacccaagcacccgccaggaagagaaagcgaaaggaggcgagggg

SEQ ID NO: 258721 - RNA, 44 nt, Homo sapiens
ccgcagaaccccacagcaagaggacgcagccagcccgacagagg

SEQ ID NO: 258722 - RNA, 65 nt, Homo sapiens
gacaaagaggggggccccggagagaaggcagacggaacagaaggaaggccgcggacccccccccc

SEQ ID NO: 258723 - RNA, 73 nt, Homo sapiens
gccggccgagcacaggagggccgaggaacgcaggggaagaggacaggcccacggcggcagaagcagcagggaa

SEQ ID NO: 258724 - RNA, 76 nt, Homo sapiens
ccagcagccgccaaaggaggaggcccagcccggagaggaaagcaaggagagaacagcccagcaaaagccacaaaac

SEQ ID NO: 258725 - RNA, 72 nt, Homo sapiens
aaaaaacaggaggacacaaggcgccagcgagagcagccacccggacaggccagggccggaggagaacagcca

SEQ ID NO: 258726 - RNA, 74 nt, Homo sapiens
cgggcgggcgagcacaggcacacacacaaggacagaaaacgggccccagacacaagccccaccaagaggacacc

SEQ ID NO: 258727 - RNA, 73 nt, Homo sapiens; identical to SEQ ID NO: 183179

SEQ ID NO: 258728 - RNA, 70 nt, Homo sapiens
gcagaccggggagggaaagaaagcgagaacaccagccggggggagaacagcaccgaaagcagaggacgga

SEQ ID NO: 258729 - RNA, 67 nt, Homo sapiens; identical to SEQ ID NO: 72294

SEQ ID NO: 258730 - RNA, 74 nt, Homo sapiens; identical to SEQ ID NO: 116613

SEQ ID NO: 258731 - RNA, 78 nt, Homo sapiens
gggggacgaccccccagagccaacacacagaagaggaggcaggaccgggcaaaaaggcagcaccccagagacacaggg

SEQ ID NO: 258732 - RNA, 51 nt, Homo sapiens
gcggcgcagcagaaaacaagggaaaaccgcaacaggagcaaaaaaggacag

SEQ ID NO: 258733 - RNA, 75 nt, Homo sapiens
ggacgccggcacgcgaagggccgcaccgcaagaagcgagagaaaacgccagagcaaccagaggcagcccaaagag

SEQ ID NO: 258734 - RNA, 83 nt, Homo sapiens
caccgcccggggcaccgaaggcggacccgcgcgcccccgcccgcagggggaggccagagccgcacagaaagggaggacggaag

SEQ ID NO: 258735 - RNA, 76 nt, Homo sapiens
gcaaagcgggaaagaggacaagaaagggaaccaaaaggccacaacagagcagacgagcagaccgaagcgcaggcaa

SEQ ID NO: 258736 - RNA, 78 nt, Homo sapiens
aaagccagggaggagccccggcggaagccacagcaggagaaggcagagagcgcaacggaaaggggcccaccagacccc

SEQ ID NO: 258737 - RNA, 64 nt, Homo sapiens; identical to SEQ ID NO: 29764

SEQ ID NO: 258738 - RNA, 79 nt, Homo sapiens; identical to SEQ ID NO: 168965

SEQ ID NO: 258739 - RNA, 76 nt, Homo sapiens
aaacggaaacagagcccagcccagaaaaggcgaacgcaagcagacggaagaagacgaagaaaacccgaagcgcaaa

SEQ ID NO: 258740 - RNA, 43 nt, Homo sapiens
cgcgcaccccccagagaagggaaggagccgacaggggaaagaa

SEQ ID NO: 258741 - RNA, 66 nt, Homo sapiens; identical to SEQ ID NO: 30834

SEQ ID NO: 258742 - RNA, 38 nt, Homo sapiens; identical to SEQ ID NO: 135853

SEQ ID NO: 258743 - RNA, 83 nt, Homo sapiens
cgcggcgggacggccggccggggaaaagccaccgaccacacgccacaaacccaccgcaagcgccaccaccacagagccacaaa

SEQ ID NO: 258744 - RNA, 83 nt, Homo sapiens
gcagcccggggagacgcggaggcgaccccgcacacacacccaccagccacggcagcccagcggggacccagccgccccgcccg

SEQ ID NO: 258745 - RNA, 69 nt, Homo sapiens
accaaccgcaaagcccaaagcgagaaaagaaacacaagcccgaaggcaccagcacagaagagaagacaa

SEQ ID NO: 258746 - RNA, 66 nt, Homo sapiens
cagggggagaagaacgcgcaggggcagcacccagcggaaaggcggaaagaggaagcggcggggcgg

SEQ ID NO: 258747 - RNA, 82 nt, Homo sapiens
agaggaggaggagcgcggaaacggcgggcccaggaccggaaggggcagcccaaggaccaagggagaagagacccaggaggca

SEQ ID NO: 258748 - RNA, 41 nt, Homo sapiens
gacaaagcaggagagacccgccagaacggggggaggacgcg

SEQ ID NO: 258749 - RNA, 42 nt, Homo sapiens
ccgggacgcccgagcccggacgcaaagaccacagcagcgcgc

SEQ ID NO: 258750 - RNA, 58 nt, Homo sapiens; identical to SEQ ID NO: 22795

SEQ ID NO: 258751 - RNA, 73 nt, Homo sapiens
gaagcggaccgggggccggcgggagaaccggaacgcagaaggagcagcagccgaccaggcaggccggcggacc

SEQ ID NO: 258752 - RNA, 78 nt, Homo sapiens; identical to SEQ ID NO: 163149

SEQ ID NO: 258753 - RNA, 110 nt, Homo sapiens
agaacaagggacaaccgaaggaccagcacaaaaacgcagccagggaaaaaacaggcacagccagaggaagaacgcaaaggaaaacaccagcaccccgacaacgcacccag

SEQ ID NO: 258754 - RNA, 38 nt, Homo sapiens
ggccacaacaagcaaccacagaccacagagaagcccac

SEQ ID NO: 258755 - RNA, 76 nt, Homo sapiens; identical to SEQ ID NO: 201426

SEQ ID NO: 258756 - RNA, 75 nt, Homo sapiens
ccaggccggagcgcgacacggagacaggggcaggcccgcacaggaaacccaagcaagggacgccaacgccaaaga

SEQ ID NO: 258757 - RNA, 113 nt, Homo sapiens
ccccaccgcacagagacagacagggagaagcaagcgggcagcggcaagaccaaaggcgggaccgcgccagaacaagcaaccacaccagagaggccagcagacaggacggccga

SEQ ID NO: 258758 - RNA, 74 nt, Homo sapiens; identical to SEQ ID NO: 226493

SEQ ID NO: 258759 - RNA, 82 nt, Homo sapiens
cgcgcccgccgacccgcgcccgccccccagcaccgggcggacggagggcggagagaacaccccgaaccgggaggcagaggga

SEQ ID NO: 258760 - RNA, 99 nt, Homo sapiens
gacgcacaaccaccgcaaccagcaggggcggacccagaaaaggcggcccagagaaacccaggaaacaacaacgggacacagcacacagagcagagaaag

SEQ ID NO: 258761 - RNA, 81 nt, Homo sapiens
gaggcgccacccagcccccccgcgaacgcccaaggaaaagcgacacaccaggcgccaagccacaccagccgcccggagagc

SEQ ID NO: 258762 - RNA, 76 nt, Homo sapiens
cacccccaggagccagggagccagacagagaccgcagaggacccaacaccgagggaaagcccagaggaccgcaaca

SEQ ID NO: 258763 - RNA, 78 nt, Homo sapiens; identical to SEQ ID NO: 116738

SEQ ID NO: 258764 - RNA, 80 nt, Homo sapiens
gagaagagaggaaagacccaacgacccgcaacacgaaaacccaggaacagaggaaaggagcagcagaacgaaggaagaag

SEQ ID NO: 258765 - RNA, 71 nt, Homo sapiens
cacgacacagggcccagcacaacacaaaaggcaagagcaacgaaccaaagcaaaggaggccgggggaagac

SEQ ID NO: 258766 - RNA, 55 nt, Homo sapiens
caacaaagggggccagggccaggccaccaggagaagcaagaacacagagaagaga

SEQ ID NO: 258767 - RNA, 33 nt, Homo sapiens
acagccagcaacaccgccgaccgggccgaggcg

SEQ ID NO: 258768 - RNA, 76 nt, Homo sapiens
gagagggaaggacgcccaagacacagcaagccccaaaccaccagccgccccaaaaccaccaaccacagcccccgac

SEQ ID NO: 258769 - RNA, 70 nt, Homo sapiens
gcagaaaggcgaggaaaggaggaaggcacaccaggccccaacagaggaagcagagcaggaaggagggaag

SEQ ID NO: 258770 - RNA, 40 nt, Homo sapiens
gacaggaaaccacaaaccgaagccaggcggaaagcaaaag

SEQ ID NO: 258771 - RNA, 86 nt, Homo sapiens
cccggccccggcccgccggagaaacaggagaaggaagcgccggccaaacgagcacagcaaacgcgaaagagcggaggcgcgccaga

SEQ ID NO: 258772 - RNA, 56 nt, Homo sapiens; identical to SEQ ID NO: 249803

SEQ ID NO: 258773 - RNA, 35 nt, Homo sapiens
gcacaacgcaacgggcgggacaacagaggcaaagc

SEQ ID NO: 258774 - RNA, 78 nt, Homo sapiens
cggaccaaggcaccagggcggaccccggggccaggccggaagcagaccccagcagcaggacccgaagacaaaaccacc

SEQ ID NO: 258775 - RNA, 110 nt, Homo sapiens
cggaaccaggcagccaacgcccggcgaagggaccagcgcagccaacaggcgcggcaccccagagaaaaccgcggaccccgagacggccgggaaaaaagccaggagcgccg

SEQ ID NO: 258776 - RNA, 74 nt, Homo sapiens
gccgccgcccgcccccggcgggggggcgcgcgcgccgggagagagcgagccaaggccagggcagagggaggagg

SEQ ID NO: 258777 - RNA, 76 nt, Homo sapiens
cggcgcgcggcgcggcggcggcccgccccgcggcccagggccccagcgcaaagcccaaggccacaccaggacccag

SEQ ID NO: 258778 - RNA, 87 nt, Homo sapiens; identical to SEQ ID NO: 247637

SEQ ID NO: 258779 - RNA, 78 nt, Homo sapiens
ggaaaaaccccaagaggaagacaaacaaccagcccaggaagaacagcagcagcgccacaggacaggcagacccgaccc

SEQ ID NO: 258780 - RNA, 72 nt, Homo sapiens
caaaaacagagcaaagagggcacaaaccagcaccgggagaggaagggccgcaaggaacgcccgcgcagcgaa

SEQ ID NO: 258781 - RNA, 77 nt, Homo sapiens
gcgaggagaacgcccgcggacgacccgaggccaggcccaagaacagcaagagcagcaaacacacgcggcaccaaagc

SEQ ID NO: 258782 - RNA, 37 nt, Homo sapiens
ccagaacacgacaacaaggaagaacaagagagagaac

SEQ ID NO: 258783 - RNA, 106 nt, Homo sapiens
ccccccggggagccgcgacccgcgccggggcggggggggggcagaccaagaaaccaacccgggaccggcagagggcaggcagcccagggagaagcggaccccaaag

SEQ ID NO: 258784 - RNA, 39 nt, Homo sapiens
cacccacgcaggccagagagagcgcagaagccgggagga

SEQ ID NO: 258785 - RNA, 56 nt, Homo sapiens
aagggacccacgagaagacgcagaggcaaaaaccacaaggaagcagcgaaaaaaaa

SEQ ID NO: 258786 - RNA, 79 nt, Homo sapiens
ccgccagccggcccggcggcgcgcgcgcgacgcgcgcgcccggcccggggcagcaggcaccagaacggaaaaaggggcc

SEQ ID NO: 258787 - RNA, 75 nt, Homo sapiens
ggcggccgcgacgcggggcagccgagcacagcacgggaagcagaacacagagagccagcagagacggcaccggag

SEQ ID NO: 258788 - RNA, 57 nt, Homo sapiens; identical to SEQ ID NO: 249748

SEQ ID NO: 258789 - RNA, 73 nt, Homo sapiens
cggccggagcccccgcccaaggagaagcgcccaagcggacggagcgaccaggcgggcacaaaacgcacacaga

SEQ ID NO: 258790 - RNA, 75 nt, Homo sapiens
aaaggggcaaaaaccccggagcccgaccaggacccgagaacaagacacagaagccggaagagggcccccaaccag

SEQ ID NO: 258791 - RNA, 80 nt, Homo sapiens
cccaaggacaacgcaagggggaagagagagaaacaaaagcgccagagccaagaacgacaagagacaaggcacaaagcgga

SEQ ID NO: 258792 - RNA, 114 nt, Homo sapiens
cacagcaccgcagccgcccagcacagagagcgcgcaggaacaggcccagccgggaaagggcagggacagagaagaccggccaggcagaggcccggggcagaacaggggaccccg

SEQ ID NO: 258793 - RNA, 77 nt, Homo sapiens
aagaaagcaacgcgagcccgcacagcaggaagagacgaagagaaaaaaagggaacggagcaaagcgaagagaccagg

SEQ ID NO: 258794 - RNA, 79 nt, Homo sapiens
accgacaaaccagcgaaggagcacccacccaggaacccgccaccagaaaggaggacggccaacccccgacacgaggccg

SEQ ID NO: 258795 - RNA, 75 nt, Homo sapiens
cacgaaaaccaagacacaaaggaacagaggaacccagggaaaaggaggcccggccgacagcgaggcccacagccc

SEQ ID NO: 258796 - RNA, 74 nt, Homo sapiens
aagggaaaggcagaagggggaagaccaaaaggaagaggacacagcgcgaccaccgccacgcagcggaccgggga

SEQ ID NO: 258797 - RNA, 76 nt, Homo sapiens
cagccagggcacccgccagccgacgaaggggagccacaggagagcgcccagcaccaacagggacgcagcaacgggc

SEQ ID NO: 258798 - RNA, 74 nt, Homo sapiens; identical to SEQ ID NO: 100606

SEQ ID NO: 258799 - RNA, 82 nt, Homo sapiens
gcgggcagcagcgcgggaagggccccaagcccagcgagcagaaggaaggggagcacccgcacggccgggccaccggagagga

SEQ ID NO: 258800 - RNA, 66 nt, Homo sapiens
gagaaagcacgggaggagaggccggaggaacaccgagaggggaacaagaacaagaaaggcacaaca

SEQ ID NO: 258801 - RNA, 97 nt, Homo sapiens
agacccgaaagcgccgagggagccgggcaacgccagccaacgacaacacgcggggccgggagacagagaaacacgaaagcagggagcagaaaaacag

SEQ ID NO: 258802 - RNA, 78 nt, Homo sapiens; identical to SEQ ID NO: 59506

SEQ ID NO: 258803 - RNA, 38 nt, Homo sapiens
acgaggaggcgcgaggagagagcagggcagagaggcag

SEQ ID NO: 258804 - RNA, 92 nt, Homo sapiens; identical to SEQ ID NO: 66397

SEQ ID NO: 258805 - RNA, 45 nt, Homo sapiens
ccgaggaggcagcgcgaccccgcacgcaaagccaggaagagagaa

SEQ ID NO: 258806 - RNA, 91 nt, Homo sapiens
acggcggccagaggcgcggggcgccgccgcgcagcgccgcgcggaagaagccccaaggagaccgccaaggagcacaggaaaagaaagcagg

SEQ ID NO: 258807 - RNA, 81 nt, Homo sapiens
ccaccaccccacgagccgcgcccagccggacaggacaaaaggacacaacccacacaagaggagaagagaacaggccggccc

SEQ ID NO: 258808 - RNA, 65 nt, Homo sapiens
gagggaggaaagcacccacccccaggaacggcagaccaagaacgagccgagaagcgaccggcaga

SEQ ID NO: 258809 - RNA, 72 nt, Homo sapiens
agccaaggcggaaccagaaaaaccacagagaggaccaaacagacccaaccgagcccccaccaggaccagacc

SEQ ID NO: 258810 - RNA, 105 nt, Homo sapiens
gacaagaccaaggcaacaaggacaacaagagacgggacaagacagggcaaaggacagaccagggggagccccccagacccgaaaggagacaagaggacagccgca

SEQ ID NO: 258811 - RNA, 72 nt, Homo sapiens
gcccaggagaaagccagggggaaaccgaggagacggggaacacacaaagaagccacaagccaacggaacggc

SEQ ID NO: 258812 - RNA, 80 nt, Homo sapiens
gcaaaaccaaacaccccagcccacagagagcaaaacacaagagagcagggaggagggaggcaagagccaggacaaggacc

SEQ ID NO: 258813 - RNA, 62 nt, Homo sapiens; identical to SEQ ID NO: 82657

SEQ ID NO: 258814 - RNA, 78 nt, Homo sapiens
cagccaagcccggaagacgcgaccgggcaccggcgggcagagaagaccagaaaggggacagcgacagaggcacacaag

SEQ ID NO: 258815 - RNA, 84 nt, Homo sapiens; identical to SEQ ID NO: 45133

SEQ ID NO: 258816 - RNA, 86 nt, Homo sapiens
gcgcaccaaacccccagcaagggacggaacaacgacagagaacaaggacccgagaggacggaccacaccgggccgaacgcgcacca

SEQ ID NO: 258817 - RNA, 38 nt, Homo sapiens
ggacaaggcacgccagacggaaaccggaaacaggacga

SEQ ID NO: 258818 - RNA, 61 nt, Homo sapiens
gagggcggaccccagaccaggcgggggcccgaccgaccccgagccccgcgacaagagaagc

SEQ ID NO: 258819 - RNA, 72 nt, Homo sapiens; identical to SEQ ID NO: 99633

SEQ ID NO: 258820 - RNA, 66 nt, Homo sapiens
ccggacaagaagaaaaaagaaacacgaaaaaagccgcaaaaagagaggaagagagagaaacccagg

SEQ ID NO: 258821 - RNA, 91 nt, Homo sapiens
cgcgaccgccgcagcccgcggagccgggccgggcgccggagccgcgccccaccccgccagcccagagccaccccaaagacggggacgaagc

SEQ ID NO: 258822 - RNA, 73 nt, Homo sapiens
cgccacggccgggcccacaagaccggggcgacaggcacggcaagagaacagcccgaacaccacagaggagagg

SEQ ID NO: 258823 - RNA, 85 nt, Homo sapiens
cgcgcgggcggcgggagagcgaggcacggcaaggggccggagggccggcccagaacgcagggaaaggaaagcaagccaggaggaa

SEQ ID NO: 258824 - RNA, 83 nt, Homo sapiens
ccccgcccccgaggccggccgccggcaggcgcagccgggcccggccccagccgacggacccgcgggacgagcgggaggggcgg

SEQ ID NO: 258825 - RNA, 45 nt, Homo sapiens
ccaggcacaggcagaacaaccgcacagagcccgccgccagccccc

SEQ ID NO: 258826 - RNA, 76 nt, Homo sapiens
cgacgcaaaggagacccaaggaacaggccaagagagccgaacccaccgagccagggaggcccaaaaccaaagaaca

SEQ ID NO: 258827 - RNA, 71 nt, Homo sapiens
gacccggcggcagagggggcggggagacagcacgacgacaaaccacgaacccaccccaagaccacacggac

SEQ ID NO: 258828 - RNA, 77 nt, Homo sapiens; identical to SEQ ID NO: 107696

SEQ ID NO: 258829 - RNA, 45 nt, Homo sapiens
gcaagaagaacgccgaaagcacagaccgaagcggcagccaaaacc

SEQ ID NO: 258830 - RNA, 91 nt, Homo sapiens; identical to SEQ ID NO: 92561

SEQ ID NO: 258831 - RNA, 76 nt, Homo sapiens
acccgcgccggcccggccgaccccggaagcgagcgcggacgccacccgggggcacagcaagggggacaaagaagac

SEQ ID NO: 258832 - RNA, 72 nt, Homo sapiens
accgggaaccacaccaccccgcgcaggagcaccagaaggcggacaaaccccaaaacgccgagcgaccagcag

SEQ ID NO: 258833 - RNA, 128 nt, Homo sapiens; identical to SEQ ID NO: 145999

SEQ ID NO: 258834 - RNA, 80 nt, Homo sapiens
acgcggggcgcgggccccgaaggccccacgaaggcaacagaaaccgaaaccagcccccaaggggaaccagccagacccac

SEQ ID NO: 258835 - RNA, 39 nt, Homo sapiens
acggagaagggcacacacggacggagaacaacagagaac

SEQ ID NO: 258836 - RNA, 126 nt, Homo sapiens; identical to SEQ ID NO: 176271

SEQ ID NO: 258837 - RNA, 82 nt, Homo sapiens
gggaggaggggaagcggaacagccagaaggacccgaaaccagcccacgccaggcaagcaccccgagcagaaggcagaccgga

SEQ ID NO: 258838 - RNA, 71 nt, Homo sapiens
cgcggaagaccagcccggccgggaaaagccaagccaagcagggggacaacagagccgacacagccaagaag

SEQ ID NO: 258839 - RNA, 32 nt, Homo sapiens; identical to SEQ ID NO: 42100

SEQ ID NO: 258840 - RNA, 51 nt, Homo sapiens
gagcagccgcgacccagaaaccgagcagacacaaccagagacgacagccaa

SEQ ID NO: 258841 - RNA, 57 nt, Homo sapiens
cagccgaagagaagggcagcgcccgaggcgagggacaagggccgccgccccgagagc

SEQ ID NO: 258842 - RNA, 78 nt, Homo sapiens
ccccgcgaccgcgcggaccagggcgacaaagggacccgaacccacgggcgaagccgaggaaagccagaccgcgaacac

SEQ ID NO: 258843 - RNA, 82 nt, Homo sapiens; identical to SEQ ID NO: 15745

SEQ ID NO: 258844 - RNA, 87 nt, Homo sapiens; identical to SEQ ID NO: 131013

SEQ ID NO: 258845 - RNA, 68 nt, Homo sapiens; identical to SEQ ID NO: 238719

SEQ ID NO: 258846 - RNA, 66 nt, Homo sapiens; identical to SEQ ID NO: 185359

SEQ ID NO: 258847 - RNA, 43 nt, Homo sapiens
gccacggcccgggagggaaggcggacagcacccaagacaagaa

SEQ ID NO: 258848 - RNA, 86 nt, Homo sapiens
ggccaggccagcgacggggccaggaagcaacggaagcgcagcaacagcaagccccgggcagggaacccgagcgcagaggggaagca

SEQ ID NO: 258849 - RNA, 76 nt, Homo sapiens
acgaacagacagaaagcaccacagaaaggggaacaacaaaagcaggaaaagggaaaggcaccagagagaacacaag

SEQ ID NO: 258850 - RNA, 98 nt, Homo sapiens
ggcgcgcggaccccgccgagccagcgccggccgcgcgccgcgcccgcgccacagcgagaaccagaagccacaggccaaccaagcaaagcaaacaaagc

SEQ ID NO: 258851 - RNA, 82 nt, Homo sapiens; identical to SEQ ID NO: 215302

SEQ ID NO: 258852 - RNA, 78 nt, Homo sapiens
ggcagggaagagggagagagccccagaacaagagaacaccggacagacccagaagagcggggcagccgaccaacccag

SEQ ID NO: 258853 - RNA, 86 nt, Homo sapiens; identical to SEQ ID NO: 105696

SEQ ID NO: 258854 - RNA, 88 nt, Homo sapiens
cacccaggcgacgcccaccaagggcgaagcggccaggcccgggcggacgcagagccagagcgccccagaggagcagagggccggaaag

SEQ ID NO: 258855 - RNA, 52 nt, Homo sapiens
agcaaaaggagaccccccggacccaaagacaggaccacgcaccagcagagaa

SEQ ID NO: 258856 - RNA, 131 nt, Homo sapiens
cgagagaggcaccgggacggaccgagaccggaccgagagcggaccgagagcgcgaaacgcacgagaaggaaagaccacagcaagaccacgcccccagccgggggaccaggccgaacgacccggacacaaag

SEQ ID NO: 258857 - RNA, 70 nt, Homo sapiens
gaagacggaaacgaggaaaccgggaaagccaccgaaaagaaaacgcacgcaaggcgcaaaagggaagaac

SEQ ID NO: 258858 - RNA, 33 nt, Homo sapiens
aaaaaaacccaacgaggacacacaaaaaaacaa

SEQ ID NO: 258859 - RNA, 41 nt, Homo sapiens
ggccggcggccccaccccccaggaccgcaagaagggaacgc

SEQ ID NO: 258860 - RNA, 122 nt, Homo sapiens
gaggcaaagggaaaaccccaaaacaccggcacagcaccacaaggcaccgccgccaggaagggcgcgcgaacacaaaggcgcgagggaccaacaaagacagagagccaagaacaggaaacgga

SEQ ID NO: 258861 - RNA, 102 nt, Homo sapiens
cgccgccgccgccgccgcgggcgccagaaggaagaggcggacggaggagcaggcgagaagagaagggccggcggccccgggagcgagacaagaggagcccca

SEQ ID NO: 258862 - RNA, 111 nt, Homo sapiens
ccgaaagcgggcccgggagacccaggcgggacagagggagccaggcagagcgggaggccaccgccccaccagcaggcaacgccacagaccgccagcgccaggacacgggcc

SEQ ID NO: 258863 - RNA, 75 nt, Homo sapiens
gcccgcacagaacacggacaggaagccacagggaggaggaccagcgggagggccacggaacgccacaccggcaag

SEQ ID NO: 258864 - RNA, 37 nt, Homo sapiens
caacccaggcaaccaacagacacggggaccaccacga

SEQ ID NO: 258865 - RNA, 67 nt, Homo sapiens
agaaggagcgagggcaacacggcaggagcaagaaagggagcgggaaagaacaaggaagagagaccaa

SEQ ID NO: 258866 - RNA, 60 nt, Homo sapiens
ggagacaccgagaaaccagaggaaggaccccagagaagacagggggcccagaggcaccac

SEQ ID NO: 258867 - RNA, 41 nt, Homo sapiens
cgacaccgcccccgccagacccggcgacaggaggcagaggg

SEQ ID NO: 258868 - RNA, 110 nt, Homo sapiens
ccggagccgacgggcggggccgcacgggaccccggaacccgcgcgcgcccacgacgccgagccaggcggcgaagagagcaggccgcccagaaggccagggcccagaaccg

SEQ ID NO: 258869 - RNA, 102 nt, Homo sapiens
cggcaccggcacaccgcggggccgaaaacaacgacaacgagcacagagacgaagaggagcagaaccagaagggacacacaggacggcaggaaggccagccac

SEQ ID NO: 258870 - RNA, 56 nt, Homo sapiens
agggaaaaggaagacacgccggcgccccggcaaggccaccgcagaagccacaggag

SEQ ID NO: 258871 - RNA, 39 nt, Homo sapiens
gcaagccaaagaacccaggccccgggaccaaggacacgc

SEQ ID NO: 258872 - RNA, 108 nt, Homo sapiens
gccccccgcgccgcagccgcccagaacccgaccaacaccagaacccagcgcccccagaagaaaacgcagcggaacagaagacacaaggagcaaaaggacaggaaagac

SEQ ID NO: 258873 - RNA, 76 nt, Homo sapiens
gaagccgaggaccaccacagaaggaagaagggcagagcggcgggaaaccaccaacaacacccccaaaccaaaacag

SEQ ID NO: 258874 - RNA, 115 nt, Homo sapiens
gacacaaaagcggaagagcagagagaaggcagggcaaaccagaaagacgggaccaagaaaggcccagggaccaaagcccggacaaggcccgagcaccaggaccgcagaaggcccc

SEQ ID NO: 258875 - RNA, 101 nt, Homo sapiens
cccggcccccggaaaaccaaccagaagacgaacaaacagcaagaaagaccacaagaccaagaacgaccgaagaaaagcaacaaaccaacaacccaagaacc

SEQ ID NO: 258876 - RNA, 106 nt, Homo sapiens
cagacaccaggacagcacccaagcaaagccacaccgacaacgaacaggaaagcaaaaggaggacgagcagaccgcagccaagagaaaaccacacaaccaagcaaga

SEQ ID NO: 258877 - RNA, 89 nt, Homo sapiens
gggcggccgcggaggcggaagcaccaggcggagggcggcagcccagacgggcgggcagggccgggcccgcaggagcgacccgagcggca

SEQ ID NO: 258878 - RNA, 78 nt, Homo sapiens
gccagcaaaaccacacagggagcggcagacgggacggccaacggaggagagaaaccgcggagaaaaagaaagcggcgc

SEQ ID NO: 258879 - RNA, 67 nt, Homo sapiens
cgccgaggcagggcagagaagacaggcaacagcgaacagagcgccgccaaggacgaaagaagacaga

SEQ ID NO: 258880 - RNA, 88 nt, Homo sapiens
gaccgagagcccggaccagcagagggccgacgggaccaagaaaggcccagggaccaaagcccggacaaggcccgagcaccaggaccgc

SEQ ID NO: 258881 - RNA, 83 nt, Homo sapiens
aaacggagagcagcagccgcccgccaaccccaggggaccagaggaaccagcccgagcggaccgaaaaggaacgcccaagcagg

SEQ ID NO: 258882 - RNA, 73 nt, Homo sapiens
ggaaccggccccacccgggaggggggagcggcgggaggccaccgccaggcgcgggacaaccaacacaaccaaa

SEQ ID NO: 258883 - RNA, 74 nt, Homo sapiens
gcgggaccagagcaaggagaggaacggccaaaacgggacaaggagcaccaagaaccgacccagaacgcaaacag

SEQ ID NO: 258884 - RNA, 114 nt, Homo sapiens
gagcagcggcgcaccgggcgggccccggacccggagacaccccgcagcacagccgcgaccaaggaaggccagaagacagaacgaagaagaagagccagagaccacagagacgag

SEQ ID NO: 258885 - RNA, 71 nt, Homo sapiens
ccgggaagcagccgccaaaaaccggacagccaagcaacagcccagcaaggggggaagaccacaagggccgg

SEQ ID NO: 258886 - RNA, 83 nt, Homo sapiens
ccaaaggcccgaggcgaaggcaaagccaaagccccaccaagacacggaccacgaggacggaagagcaagcgcaaccggccaaa

SEQ ID NO: 258887 - RNA, 85 nt, Homo sapiens
gccacggaaggcaggaagccggggcggaacagggcgcacacccgcacgcccagaaccgggacaacccagcaaacaggccagaccc

SEQ ID NO: 258888 - RNA, 63 nt, Homo sapiens
caagccgcccacacgccaaccggccagaggacgagggacacccaaaggacggcgggaagaggg

SEQ ID NO: 258889 - RNA, 36 nt, Homo sapiens
ggggacacaagcccccaagccacaagaaggagagac

SEQ ID NO: 258890 - RNA, 69 nt, Homo sapiens
gcgaggaacgccgggcgcgggcccacgcggcgcaggaaacagaaccgaagccggaccggggcccagcaa

SEQ ID NO: 258891 - RNA, 36 nt, Homo sapiens
aaggagccggggcggcagaagccccggaggaccagg

SEQ ID NO: 258892 - RNA, 103 nt, Homo sapiens
ggcagacggcgcagcacgccaaagcgggccaaccacacagcacgacacagcgagaaaaagagacaagaacaaaagagggaagaagaaggaaagacacacacgg

SEQ ID NO: 258893 - RNA, 101 nt, Homo sapiens
cggcgcgccgccgaaggcgggcgcagcggcggagcggagcggagcccggaggagggagacgcgcacggaccggaaccagaacaagacgaaagacaacgagc

SEQ ID NO: 258894 - RNA, 83 nt, Homo sapiens
ccgacaagaagaagagaacaaagagccgggagacggagcacggcgccgcggcaagagccagaacggcgcacgaccccagagcc

SEQ ID NO: 258895 - RNA, 101 nt, Homo sapiens
aggcaagacgaaaagaacaggagcaaaacgggaaaaagccagaagggcaaaaagggagaaaacgggccggaggaaaagggcggcaggggaccaccacacaa

SEQ ID NO: 258896 - RNA, 76 nt, Homo sapiens
gaaagagggcagcggaaaagcaaagacaagccgggaagagaaagcggcacacacccgaaaaaagaagccaaagcga

SEQ ID NO: 258897 - RNA, 110 nt, Homo sapiens
cgcggcaggagggccgcaagacccaagaagaagaaggcgaaggaccccaacggggaggccaacggaagaaggggacccgacgaccagggggagagacccgcgcccccccg

SEQ ID NO: 258898 - RNA, 69 nt, Homo sapiens
aagagagaaaagagagaaccccaaccggggaggaaaaccgacgaaggcaaaggccaagaagggggcaga

SEQ ID NO: 258899 - RNA, 106 nt, Homo sapiens
ggagaccaggggagcagcaaggagcaaaacacgagagcccacaccgggaaaggaccaaaggaccgccggaagcaccaggagcgcaagccagcagaggagcgcagag

SEQ ID NO: 258900 - RNA, 69 nt, Homo sapiens
cgaccagcggcccggccaccagcccccacacacaaaagcggcaggggggaccacacgccaaaggcacgg

SEQ ID NO: 258901 - RNA, 79 nt, Homo sapiens
accaaggcccccaagccccccggcgacgacgcccgaggcaggagacagagagaaagcaacagcaggccagccccagagc

SEQ ID NO: 258902 - RNA, 88 nt, Homo sapiens
caccccacagcccagggaaggcaccaaaagggggggcaggaaagggcaacggagacagaaaccaggaggccaagcaagggaaaaagac

SEQ ID NO: 258903 - RNA, 138 nt, Homo sapiens
cgaggaggagccgcgcaccagcaggggggcaacagccagccagccagcgccccgcacccacgaccaggaacaagcacaagcccggcggagcccaccaccacggcaagcacagagaacgacaacaccggccccgacccc

SEQ ID NO: 258904 - RNA, 120 nt, Homo sapiens
cggcacgggcggcaggacacagccgcaagaacaacacgcccaggccggcaccccgggcgcagagaagaacgccaccaggcaaaccccggcgagagccggagaccgaacaccaccagaagg

SEQ ID NO: 258905 - RNA, 70 nt, Homo sapiens
agcgcagaggacgccgaggagggggacccacgcccggcaggagaggcgagaacgcggacaagcaaacaaa

SEQ ID NO: 258906 - RNA, 74 nt, Homo sapiens
gccagggggcagcagcgcaccccaccgaccagcggacacgggcaaaagagccgggaacaacccaggggaaccag

SEQ ID NO: 258907 - RNA, 79 nt, Homo sapiens
cgaagcagcgccaggaaaacccacaggagggccagaggacaaagcacggcggaagagaagccagccgccggcgacagag

SEQ ID NO: 258908 - RNA, 113 nt, Homo sapiens
gggaggagccgacagcggaggggggaagaccggacccaaaccgaccaggggggcccagaccacacgggcaggcaggagccccaccgacccggcagaagcccgggcacggagaa

SEQ ID NO: 258909 - RNA, 80 nt, Homo sapiens
aaaacaggcgccaggagaagacggcgaccccgccaccaaccacagggcaacgcacccacgacgagacagcggccagccga

SEQ ID NO: 258910 - RNA, 70 nt, Homo sapiens
ggccacggcaccggcacaccgcggggccgaaaacaacgacaacgagcacagggggccgagacaacaagaa

SEQ ID NO: 258911 - RNA, 79 nt, Homo sapiens
gcgggacaggagggcaggaagagcgcagcggggacaaggaacccaagacagaccaggagaggagcagccggaaagcaac

SEQ ID NO: 258912 - RNA, 38 nt, Homo sapiens
gaccagaaccagcccgggaaaggcgggaaaaccgccac

SEQ ID NO: 258913 - RNA, 87 nt, Homo sapiens
gcaaaaaaaagccacaacgggcaaagcacagccggccgaggggagagcccacgaagccagagcaggaaggagcagcccagcagccgc

SEQ ID NO: 258914 - RNA, 78 nt, Homo sapiens
agcgcgaccgggaggcccaggcaccaggagaacaagagaccccccggaggaggggccagccgcagccggcgagaaagc

SEQ ID NO: 258915 - RNA, 120 nt, Homo sapiens
ccacgcaaacagacggaggagcggagaagcccggggcagggacccgaccccggccccacaagaggagaggcaggaggcgacggccgacaccacacagcccgaccgcgggaggagccgacg

SEQ ID NO: 258916 - RNA, 79 nt, Homo sapiens
agcgcccccggcccaagaaggaccccagccaacagagcgggggcggggaccaagagaagagcagaggaccagcaccgcc

SEQ ID NO: 258917 - RNA, 80 nt, Homo sapiens
aacacgcggagcggaagacggcaacccagccgccgccccagcgaggcgcggaacgagacgggaacagccacagcccggaa

SEQ ID NO: 258918 - RNA, 84 nt, Homo sapiens
agaagaggaaagagcccggaagacgcggcgccggaggcaaagggagaacgggccgggcgaccccccacagccaggcggccaccc

SEQ ID NO: 258919 - RNA, 60 nt, Homo sapiens
gaggacaggccagccggaagaaaacagccacgaggacaagagaggcccaccaagaagccc

SEQ ID NO: 258920 - RNA, 96 nt, Homo sapiens
agcaaaagaaggccaaagaaggagaaaagggagcagcaggagccccgcgggaacagaccacgggagaaaaacaagaaacagcagccaaccaggccc

SEQ ID NO: 258921 - RNA, 92 nt, Homo sapiens
gcccggcccggccccccagaggaggaaccacaagagccagaagggagaggacgcagacggaaccgaccgagcagggcacaagagagccacag

SEQ ID NO: 258922 - RNA, 107 nt, Homo sapiens
acaaacaagaagcgaccccgcaacaggcagaggaacgaaacgacaaggaaaacaccccacaagcaccccacagagcgcaggaaggggaaccgggaaaaggcagagag

SEQ ID NO: 258923 - RNA, 114 nt, Homo sapiens
ggggacacgcagccggagcccgggaggggccgcgccgccaccgcgaacaggagcccgacagaagggaaaacaggggagagcacagacagcgggaccaaagagcccgacacgaaa

SEQ ID NO: 258924 - RNA, 68 nt, Homo sapiens
ccacggcaccggcacaccgcggggccgaaaacaacgacaacgagcacagggcgaagcagcaaaacaca

SEQ ID NO: 258925 - RNA, 134 nt, Homo sapiens
agagaggcaccgggacggaccgagaccggaccgagagcggaccgagagcgcgaaacgcacgagaagggaccaagaaaggcccagggaccaaagcccggacaaggcccgagcaccaggaccgcagaaggccccag

SEQ ID NO: 258926 - RNA, 73 nt, Homo sapiens
ccccgacagcgccaggcccagacgccaacgcaggagcacccagagcccccaaaccggaggaaaggccacccag

SEQ ID NO: 258927 - RNA, 87 nt, Homo sapiens
ggccggagccagggaggcggcggcgggaacgagggcgagcagaggacgacaggccgggagagggagacgcgcacggaccggaaccag

SEQ ID NO: 258928 - RNA, 89 nt, Homo sapiens
caggaggagaaccgcgaccgcgcaaagccagcggaccaccagggagaaggaagggaaaacgaagaaagaaaccggcagggaaaagaaga

SEQ ID NO: 258929 - RNA, 55 nt, Homo sapiens
aggagaaggaagaggagcggacaagagaaaaggaaaaagaacaaaaagcgaaaag

SEQ ID NO: 258930 - RNA, 68 nt, Homo sapiens
ccagagaagaacaccagaaaaagaaccacgccgggaccccgacggagagacaaagaagacggaggggg

SEQ ID NO: 258931 - RNA, 41 nt, Homo sapiens
ggagagaggccgcgccgggcagaggcagcgcgcaaagagag

SEQ ID NO: 258932 - RNA, 85 nt, Homo sapiens
gagaacaagggaaccagccaaaaggaccaagaaaggcccagggaccaaagcccggacaaggcccgagcaccaggaccgcagaagg

SEQ ID NO: 258933 - RNA, 47 nt, Homo sapiens
gccgggaagcgagccgcgacccgagcggccaacggaccacaccaaaa

SEQ ID NO: 258934 - RNA, 94 nt, Homo sapiens
ggcacaggacggccgcaggaacaggcaagggcgaggaagcaggcacgcaagaagaaggggaaggaggccagcagcggacacgaccgagggaaca

SEQ ID NO: 258935 - RNA, 87 nt, Homo sapiens
cgggccccgggcagcagagcggaggcgcgccacgaaaccgaccgcggcaagagcaggcaaacggagagcaggagccacaggaaagag

SEQ ID NO: 258936 - RNA, 114 nt, Homo sapiens
caaaggacgagaagggaaggaaacagcaagcgaagccgaaaaagcgcccgagacgggcccgccgaaagacgagcacgaagcggaacaaagggaaacgacgagagggccacgcaa

SEQ ID NO: 258937 - RNA, 76 nt, Homo sapiens
agaacgggcccacacaacccaggcaaccaacagccaggggacccacccagagggccaggaaacacgcggccagccg

SEQ ID NO: 258938 - RNA, 120 nt, Homo sapiens
ggcgccgggacccgccgagcccccgccccgcccggagggaaagcgggggaggagcgcggcgcggcaggaagccacagggaggaggaccagcgggagggccacggaacgccacaccggcaa

SEQ ID NO: 258939 - RNA, 83 nt, Homo sapiens
cgcaggccgagggacggccaagaagcgcaaggcggccccgcgagcccgagacacgaccggcaagagcccaccgcggagaggag

SEQ ID NO: 258940 - RNA, 61 nt, Homo sapiens
cgcgccccgacccccgagccggggccgaggaccgacaggagcggacccgcggaggggcggg

SEQ ID NO: 258941 - RNA, 82 nt, Homo sapiens
caggaccacgcggaaccccagagcacgagagagcaagaaaaaagacgcgacacaacacgccgcaaagaaacagagcacggcc

SEQ ID NO: 258942 - RNA, 67 nt, Homo sapiens
cgacacggccggagcgccaaaagcgacagcaccaagacgaccccccaccccgaaaccaaccaaagaa

SEQ ID NO: 258943 - RNA, 106 nt, Homo sapiens
ggaggagaacaagcagagaaagagagggaaaaggaagacacgccgaaaacagaaaggcaggacagaagggcacgcacacacaaacaagcaaccaacaaggacccag

SEQ ID NO: 258944 - RNA, 124 nt, Homo sapiens
gcagcaggaggccaagcccaggcccacgcacaagcgggcaccagggccgaccgccgcaggaaaccaccccacccaacccccgacacagaagaggagaaaacggaacaacaggagggcaacccag

SEQ ID NO: 258945 - RNA, 108 nt, Homo sapiens
cggaaacccaggacaaaacaagcagcacagcagaaaggcacgacacaccgaggcagaagccagagggcgcgaacccgggaccggaacaagaagaagaccccacggaag

SEQ ID NO: 258946 - RNA, 73 nt, Homo sapiens
cccacccgccccaccgcagcccaccccagagaaagaccaggcgccaacggccgacaagcccgacgaagaccgg

SEQ ID NO: 258947 - RNA, 124 nt, Homo sapiens
cggcggcgaggaggggaaccggccccacccgggaggggggagcggcgggaggccaccgccagccaacgggccgaagagcgaaagcgaaaaaggcagcagcccaaaagaaggaacaccgccggcc

SEQ ID NO: 258948 - RNA, 43 nt, Homo sapiens
cccggcagacggccagggaaggagaaaagccaggagaccagca

SEQ ID NO: 258949 - RNA, 121 nt, Homo sapiens
aaaaacaagcaaaccccagacagccggggaggcccgacagcccaggacacccccagagaaggcaaaacaccacagacgaaccagagaaaaccaaacaaaacaaagacagcagaaaagaaag

SEQ ID NO: 258950 - RNA, 68 nt, Homo sapiens
ggaaaggcccggcagcgcggacccgagccccaaagacagaaaagccccgagacggaagagaagagaag

SEQ ID NO: 258951 - RNA, 37 nt, Homo sapiens
cgggccacggcacgcagagaccagcgaagcgcggcaa

SEQ ID NO: 258952 - RNA, 64 nt, Homo sapiens
gcagaagaaagaagaggagaaggagcagccggccaagcaaaagagagcaagagaagccgcaaaa

SEQ ID NO: 258953 - RNA, 131 nt, Homo sapiens
gaagccgagaagcccgaggcgcaggggcggggaggagacggcggaaaacggagagacggggagaagcgggggcacgaacagcacaccggaggaagccacacaccgggccaggagcgaccccccacacgaag

SEQ ID NO: 258954 - RNA, 78 nt, Homo sapiens
aacagacaggaaccaagacgcggaacagcacaccaggagagaagcgacagccgcagggcgaagagagaacacgcacgg

SEQ ID NO: 258955 - RNA, 41 nt, Homo sapiens
cggcgcgagccaagcgcgcgccgggggggccccagcccggc

SEQ ID NO: 258956 - RNA, 59 nt, Homo sapiens
gaccgcgggcacgcagcgcccgccgagacgcgcaccaggaaaggcacaaggaagaagcg

SEQ ID NO: 258957 - RNA, 74 nt, Homo sapiens
ccaggcaagagaacgcagagaaagcaccgcagacaccgggaagagggccggagccgcaccaggccacggcgcgc

SEQ ID NO: 258958 - RNA, 54 nt, Homo sapiens
cggaccagcgcgcccacagcccccaccaacacaggaaggaaaaagcaacggaca

SEQ ID NO: 258959 - RNA, 83 nt, Homo sapiens
gggcccaccggcaaccacaagccaggaagaaggagaaagcccgaacgcgggaagaacgaagaaggacaaaaaggagaggcgac

SEQ ID NO: 258960 - RNA, 104 nt, Homo sapiens
agcgccgaccacacgcgcgcgccccaccagcggggccgcgaagggacgcagaggaaaggagaaaagcgcaaccacgagggcgagaggaagggacaacaggaagc

SEQ ID NO: 258961 - RNA, 67 nt, Homo sapiens
acggccccacccccccgaagagaaggcagcgccagggcaggcaaccagcagagacccgcaccgccag

SEQ ID NO: 258962 - RNA, 62 nt, Homo sapiens
agaagcgcaccccgacgccgaggaacgagagcgcgaagcaagggaaagaccaggagcaggcc

SEQ ID NO: 258963 - RNA, 88 nt, Homo sapiens
gggacgacggagcgaggaagacgccgacaccccaggccacgagccccaggccacggcagcaggcccagcccccagcgaagcagagccg

SEQ ID NO: 258964 - RNA, 112 nt, Homo sapiens
ggagcggccgggggacgcgcggaggcgcacgacccggggacccacagcgcggcaggacacagagcgggggaggaaaagccagaggaggaacacaagagagcccgagcccaca

SEQ ID NO: 258965 - RNA, 89 nt, Homo sapiens
caaaaccgaaagacgggccagagacgacaacccgggccccgagcggaaaggcagccacagcagaggaaagagggaaagacaaaggccag

SEQ ID NO: 258966 - RNA, 117 nt, Homo sapiens
acagacccggggaacacagccggaacgcgacaacagggaagagggcgagaaacaagccagcagcccgcacagcggacgcaaagaaaaagacggcaaaagaaaagcagccgggacccg

SEQ ID NO: 258967 - RNA, 89 nt, Homo sapiens
ggaaacgggcgaagcgacgagccgcgaggaggagacagggaaacgaaaaccaccgggcaccacgagcccacgagagaggacagccccag

SEQ ID NO: 258968 - RNA, 82 nt, Homo sapiens
caacggaaaccagaaaccaagaaagcagaggagcaggcgaaaagagagaaggacaagcagaaaacccaggacccacaaggag

SEQ ID NO: 258969 - RNA, 94 nt, Homo sapiens
cgggcccggccggcacggcgaaccacgcgaggggcgggagccgcgcacaccaccacaccacggcggcccccacacacggccacaacaaccggcg

SEQ ID NO: 258970 - RNA, 82 nt, Homo sapiens
ccaggcggccaaccggcccaaggaccccgccagcccaagaagcgaggacaggggacccacagaaagggcccagcgccacccg

SEQ ID NO: 258971 - RNA, 74 nt, Homo sapiens
gggcgccgcccccccggcccccgggacggcccaaggccagcccgcagggcggagaacggaaaagcaccaggaag

SEQ ID NO: 258972 - RNA, 117 nt, Homo sapiens
caaaccacgacccaccagaagaaaccagacgagaagcagacgcggaccaacaacaaaaacagacccggacagaaccggcagccgagcagcagccgccccgaggcgaagccaggggga

SEQ ID NO: 258973 - RNA, 51 nt, Homo sapiens
gggaggccagccggagaagcgagcagcgccggacacaagagggcaagaaag

SEQ ID NO: 258974 - RNA, 115 nt, Homo sapiens
cgaagaaggcgcagcagaggggccacgcgggcccgaggcgcaccaagggcgaaggagccggcccaaggccaccagcccccgggccaagagcagcacggagacagagccacacacc

SEQ ID NO: 258975 - RNA, 105 nt, Homo sapiens
aaggagagacaccaaaccgacagacagaggaaaaccgcggaaacacacaaaccaaaacgcgaaaggagcaaaggagaaggagaaagaagcacaaaaagcagccca

SEQ ID NO: 258976 - RNA, 80 nt, Homo sapiens
agggaggagagacagaaacacaacaaaggaggccggaagaacccaagacggcgaaaggcaagaagaaacacacgcgcggc

SEQ ID NO: 258977 - RNA, 101 nt, Homo sapiens
aagacccaagccccgaaccccaccgcacccgagccgcccggccaccccgcacgcggaagcgaaacaggggcacggccgccaagcccacaaggaaaccgcac

SEQ ID NO: 258978 - RNA, 41 nt, Homo sapiens
ccagcccagacacaccagccaggcagcggccccgcgaagcg

SEQ ID NO: 258979 - RNA, 110 nt, Homo sapiens
ccaccggccgcgaccaaacgacgggggccggagcccacagcgacagggagccgaggaaggcaccaggagaggaggaggggagacgcccaggcagaaagcccaaccagccc

SEQ ID NO: 258980 - RNA, 79 nt, Homo sapiens
aaggaccaagaaccagcgcgccccagaccaccggcagggaacagccgagcagaccgaggaggcccaccagcagacgcca

SEQ ID NO: 258981 - RNA, 113 nt, Homo sapiens
gccccccgacgccccgccgccgccgaggaggcgagcagccgggagacaccgccaccgccaggggaaaaacccaacccaccagaggccaaccagagcagacgagccaaaaccag

SEQ ID NO: 258982 - RNA, 75 nt, Homo sapiens
gcaaaggggaggacagacaaacagaacgagagccacaggcaggaccagccgcccccaaaaaaagcagagcagaca

SEQ ID NO: 258983 - RNA, 106 nt, Homo sapiens
cggcaaggccacagaccacaacaccaggaggaccagcggacgacccccgggacagacccaacagaggaagccgcaagaaacgggacgacaggaaggccagagaagg

SEQ ID NO: 258984 - RNA, 80 nt, Homo sapiens
cagaaacaggcgaagccaaagcagcacgcgaggaggaaaggcaccccaccagcccagaaacagacaaggaggacccgccc

SEQ ID NO: 258985 - RNA, 109 nt, Homo sapiens
gacgcggcgccggagaggcgccggcgcgcgggccccgcagcgcacccggcggcggacaggaaacccgaccgccccaggggcacagcaggaccagcagggccccacacag

SEQ ID NO: 258986 - RNA, 74 nt, Homo sapiens
gcccagccccacacgcagagaacacggaccagaaagaggcaccggccgcgaaaggcgaccagaagcgggacaca

SEQ ID NO: 258987 - RNA, 114 nt, Homo sapiens
gacccggcccaggccccacaccaccgcacgcgcgcccgccgcccgaggagccccgcgcggcaagagaagcacgacccagacccccagcagggcagcaggaaccaggccaagacc

SEQ ID NO: 258988 - RNA, 106 nt, Homo sapiens
acgcaacaaaaacaaggagagcccagcaacggacccaacagagcacgcaaaggagacgaagaggagcagaaccagaagggacacacaggacggcaggaaggccagc

SEQ ID NO: 258989 - RNA, 94 nt, Homo sapiens
ggcaaaagcacaaggaccgcggacagagacaacaccgagagagaacacacgagggcccaaaacacggagccccaagcgcgccgccaggaagaac

SEQ ID NO: 258990 - RNA, 71 nt, Homo sapiens
acagggccagcacgccaccgggaaggcggggaggaggccccaaagggcgagggccaggcgaaaggaaacgc

SEQ ID NO: 258991 - RNA, 73 nt, Homo sapiens
caaagcggccagggagcacagaacccgcccgacgaaggagaagccgaaagaaaagaaccaaacggcgagaaga

SEQ ID NO: 258992 - RNA, 81 nt, Homo sapiens
gcgggggcgccggcagaggaccaggcaccaccggccccggaaggcgaggaccggcccagccaggcccggggcagcggcgac

SEQ ID NO: 258993 - RNA, 98 nt, Homo sapiens
ggcacgcgacggaggcggcggacaggcgacagcgaccgcggcagccccggagcccgccgcccgccaccaggccagcagcgaaggagcccaccgccccc

SEQ ID NO: 258994 - RNA, 84 nt, Homo sapiens
ccggggcggaaagggacccgacacgaacaaaaggacagcgacagacagcaaacacagccagaacagaggaccggggagaagggg

SEQ ID NO: 258995 - RNA, 83 nt, Homo sapiens
gcccacagcccccaccaacacaggaaggaagaagaaaggcgaggcacgagccaaaaaagaggaagagaagaagcgggaaagca

SEQ ID NO: 258996 - RNA, 115 nt, Homo sapiens
accaagcgggaccccggagcgacccggacaccgacgcgccacgcggagcccggccagcacccgcccgaggacagagaggcgagcgcccggaggggagagagcggaggacagccga

SEQ ID NO: 258997 - RNA, 116 nt, Homo sapiens
ccgcccacaagagacaaagaaaaggaggaaagcgcggccggaaacagcaaacagagggcccgccccagcccgggcagccagcgccgggcgcccgccgccgcagcccaccacagcca

SEQ ID NO: 258998 - RNA, 82 nt, Homo sapiens
cagcgcgggcggagcgggggcgcgcccgccgacccgcgcccgccccccagcaccgggcggacgggaggggccaaagggagag

SEQ ID NO: 258999 - RNA, 136 nt, Homo sapiens
caaggagcggaccagggacgagcagcgaacgaggcaagcagcgccgagcccaggcaagagcccgcgagaagagcccaaaaggcagagcgaggagagaagaaggagggaaagccaaacaacggacaaagaccaggga

SEQ ID NO: 259000 - RNA, 101 nt, Homo sapiens
ccaagaccggcagaaggaagcaagggcaacggggcacgcaaagaggaccgccaacaacagggccaagggcagggagaagggacaacacagaacacagacca

SEQ ID NO: 259001 - RNA, 82 nt, Homo sapiens
gaccgccgaggccgcccgagcggagcggggcgcaggcgccgccgccggacgcggcaacggagaaggcaaccagaggccaggc

SEQ ID NO: 259002 - RNA, 104 nt, Homo sapiens
aagagggaagggccgaaccggccagagggcaagcaaagaccaagagaagaggagccaaaacacaccggaagaccccaccacccccgagagaaggccccgccaag

SEQ ID NO: 259003 - RNA, 118 nt, Homo sapiens
gcccgggggcaggcgcccgcccccaggcgcgcccagccccgcagccagggcgaacccccgcagaagagccagaagcagcaggaccggcggaggagcgagagcaggacagaggaccagc

SEQ ID NO: 259004 - RNA, 31 nt, Homo sapiens
cgagacaggaaagcgcaagccaaaccagaag

SEQ ID NO: 259005 - RNA, 76 nt, Homo sapiens
caaaacaccacgagaaaagaaaaccggagcccggagcaaaagaccccccaccccgaaaccaaccaaagaagccccc

SEQ ID NO: 259006 - RNA, 83 nt, Homo sapiens
cccaaggcccgcccgggagggccggggccgcgccaggggggaggccaccaacgggggagcccgcaggaaaacagcagcagagg

SEQ ID NO: 259007 - RNA, 109 nt, Homo sapiens
gagccacgcgaggacagaaaacgcaagacaacaggagaggaaagcggaaagccaaggggccaggaagaagaggacacagaaggcgcacccccagggaaaacaccccccc

SEQ ID NO: 259008 - RNA, 53 nt, Homo sapiens
gggaggagagagggagagccaaagaaggccccgggaccaaggacacgcagacc

SEQ ID NO: 259009 - RNA, 65 nt, Homo sapiens
gcagcaggaaggagaccaaggaagaggagcaggacggagggagaaggggccacacggaagggccg

SEQ ID NO: 259010 - RNA, 43 nt, Homo sapiens
gccaaccggccagaggacgagggcaggggccgacggagcaaga

SEQ ID NO: 259011 - RNA, 92 nt, Homo sapiens
agcgaacaggcacgaaagagcccacacacacgagcgcaggacggggggggaacaccagccccaaaacagcgacagagcagaccacaggaccg

SEQ ID NO: 259012 - RNA, 35 nt, Homo sapiens
cgcgcccgcggccggggggacgaggacgaggaggg

SEQ ID NO: 259013 - RNA, 75 nt, Homo sapiens
cggcggggaggagaccaggcgacaccgcgacaccccaacaaacaccagcgcggaaaccccaccacgcggcagggg

SEQ ID NO: 259014 - RNA, 62 nt, Homo sapiens
ccaaaccgacagacagaggaaaaccgcggaaacacacaaaccaaaacgcggaaggagcaaag

SEQ ID NO: 259015 - RNA, 90 nt, Homo sapiens
gacccgccagcagggggagaggcaaagacaccggcagagaaccaaagggagcgaacgaagaaaggccaagagggagagacaaggagaacc

SEQ ID NO: 259016 - RNA, 107 nt, Homo sapiens
acgccacggacagaccaacggaagaacacagcagcagaaagaggaaacggacaggaaaaagcaacggacacagaaccaaaggaaaaaaaccggaacaacgaagaaaa

SEQ ID NO: 259017 - RNA, 101 nt, Homo sapiens
cgaccgacgagcgcacgaggaggcgcgcagaaccagaccgggagcacgcacccacgaggggaaacccagacgacaaggaaggccaagggacccacgaccaa

SEQ ID NO: 259018 - RNA, 127 nt, Homo sapiens
cagacacggaccgagccgcgaggacacgggcgcaaccgcagcacacagcgaccgggagaacaagacgcgccacgggacagccaacaccagaccgagcccacgcgcgccacagggaggggaggcgcac

SEQ ID NO: 259019 - RNA, 73 nt, Homo sapiens
gagccgcggggcaagacagacagcagcccccagggacccaaggacgaccacaggacacggaccccacaaagag

SEQ ID NO: 259020 - RNA, 90 nt, Homo sapiens
gacaagggggaacaaaccaccggcccaaagacaaccgggcacagcaaggcgccaccggaagaaacgggaggggaggagccgggaaagaca

SEQ ID NO: 259021 - RNA, 76 nt, Homo sapiens
caaaacaccggaaaccccagccgggaggggagcgggaggaggccgccacaggaaaaggcgaaagaaggaaccaaac

SEQ ID NO: 259022 - RNA, 36 nt, Homo sapiens
ccgcgccgcagcgccaccgcccgacggagcagcagc

SEQ ID NO: 259023 - RNA, 89 nt, Homo sapiens
ggcacaccgcggggccgaaaacaacgacaacgagcacagaaaaccccaaagaaggcccccgcggcgcaccggcacccggcccgaccggg

SEQ ID NO: 259024 - RNA, 77 nt, Homo sapiens
ccagcgggccccgcccccagacaggccaacaagggccccaggcagagccgcgaaggcagccaaaacgagaagaagag

SEQ ID NO: 259025 - RNA, 58 nt, Homo sapiens
ggggccagccaggacacacagacccagcggaaccgagcccagcaaaaagaggagaagc

SEQ ID NO: 259026 - RNA, 86 nt, Homo sapiens
gcacaacagagcgcacggagagcaaggaaggagggcagcccaaggggcaaccagggaccaggaggaaggagcggagaggcaggcgg

SEQ ID NO: 259027 - RNA, 114 nt, Homo sapiens
gagcggagcaccaggcccggaaagagcaggcacccggagcaaaagcccacgacgcccaccgaaagagaggaaccagaaacaagcaacacaaagggaaacgggacaacccacgac

SEQ ID NO: 259028 - RNA, 77 nt, Homo sapiens
acggaggggaggcgagagcgagaggacccagcccacaccccaggcgaacaagaggcgccagcgggcgcgccggaaga

SEQ ID NO: 259029 - RNA, 83 nt, Homo sapiens
ggagcaaccccccaggacgggcggaggcggggggaccggcgggcggggggggccccagcccggccgaacgggcgcacgacaca

SEQ ID NO: 259030 - RNA, 81 nt, Homo sapiens
gggcgccgccccgggccccccagcagaagaccccggcggacacagggggggccccagcccggccgaacgggcgcacgacac

SEQ ID NO: 259031 - RNA, 109 nt, Homo sapiens
ggccggccccgccccgcgcgcagcccccgccgagccgccccgagcccgccgccacacccgagagcccaaaaggcagagcgaggagagaagaaggagggaaagccaaaca

SEQ ID NO: 259032 - RNA, 60 nt, Homo sapiens
gaacaccccgcgccgccaacccgcccccagcgacagccgcgcgccccagaccaccggcag

SEQ ID NO: 259033 - RNA, 65 nt, Homo sapiens
gggggaagccgcagcggaaagcaggagcacaggacagggggaccgcccaggccaagggagagaag

SEQ ID NO: 259034 - RNA, 102 nt, Homo sapiens
cgcgacgccgcggacccccgcgaccgcgcggaccagggcgacaaagggacccggccggaagaaacgcggaccgcggagggccggagagcgggacccagagcg

SEQ ID NO: 259035 - RNA, 71 nt, Homo sapiens
cgggcgggccggcgagcgcagcgcgaccgggaggcccagcgggcgccaggacccccccagagccaagaccc

SEQ ID NO: 259036 - RNA, 83 nt, Homo sapiens
gcccggagggaaagcgggggaggagcgcggcgcggcaggaaccccgagaagcaggggccaaaggcgggaagagggggcagccc

SEQ ID NO: 259037 - RNA, 81 nt, Homo sapiens
gcacgcccaccgcaccgaccaggaccacagcggcaaggcccaagcccagccaagaggccccaaagccggggaagaccagcc

SEQ ID NO: 259038 - RNA, 74 nt, Homo sapiens
agggcggagagacccgggggcgagcacaaacggggcggggccggggaacacacagcgcaagccaaaccagaaga

SEQ ID NO: 259039 - RNA, 75 nt, Homo sapiens
agacccaggcacccacccgccccaccgcagcccaccccagagaaagaccaggaagcgccacgcagagagcaaggc

SEQ ID NO: 259040 - RNA, 52 nt, Homo sapiens
gagcaccgggacggaaagggggcaggaaaggcgccccggcaaggccaccgca

SEQ ID NO: 259041 - RNA, 54 nt, Homo sapiens
gccgagagacccaagaaacagcaaggcgccaccggaagaaacgggaggggagga

SEQ ID NO: 259042 - RNA, 76 nt, Homo sapiens
ccagcgcacgccccacggaacaccccgcgccgccaacccgcccccagcgacagccggcgccgggcaacgccaggcc

SEQ ID NO: 259043 - RNA, 74 nt, Homo sapiens
gcgacaacccccagaagagaccaacgccaccaaccaaccgggaacccaccggaaacgcagcccagggcacgggg

SEQ ID NO: 259044 - RNA, 121 nt, Homo sapiens
agaggaacaagaggccacagaagggcagcgggagcgccgaagagggccgaagaagagagagcagccccacaaagggaaggccgaagacgcaaccaaccaaaacagccagccgcagagaccc

SEQ ID NO: 259045 - RNA, 120 nt, Homo sapiens
ggaaaaccggggaacgagcgcccaaggaccgcccacagcagcagcacaacagaggcggggaaggaagaaggccagcgaagggaaacaaaacacccagaaggaaaccaggcggggagcagc

SEQ ID NO: 259046 - RNA, 97 nt, Homo sapiens
gcaagacgaaaagaacaggagcaaaacgggaaaaagccagaagggcaaaaaggcgccccggcaaggccaccgcagaagccacaggagaccggaggcc

SEQ ID NO: 259047 - RNA, 36 nt, Homo sapiens
aagagaaacgcaaccggaaccaaccacccaggcaaa

SEQ ID NO: 259048 - RNA, 109 nt, Homo sapiens
gaagaccagccgacaaggagggaagcggccccagcaccccagcgcgcagggccgccaggggcgccggccagcagggagaacaagacccggcgcacaggagcagggcggg

SEQ ID NO: 259049 - RNA, 141 nt, Homo sapiens
cgaccacaggaacaaggagaagaccaggaagagaaagagaaaggacaagcaggaacccccaggaaggagggagccccaggaacaggagcccaccgaagaacgcccgacagaacagagacccccaccagggcccaaacagag

SEQ ID NO: 259050 - RNA, 74 nt, Homo sapiens
gcacgggggaaacaagcgaaaaacaggcaaggaacccaacgccccaccagccaggacgcagggcgccggaggcc

SEQ ID NO: 259051 - RNA, 104 nt, Homo sapiens
agagccggaaaggggcaaaaaccccggagcccgaccaggacccgagaacaagacacagaccgggaaggggaacacaggagcgcgagcaccaagaaaaggaaaca

SEQ ID NO: 259052 - RNA, 85 nt, Homo sapiens
acgacccggagcacccgaccccgaggaacaggcgcggaacagcccggaggagaggaccgaagaagaggaggggccccaggccaaa

SEQ ID NO: 259053 - RNA, 107 nt, Homo sapiens
cgagcgggaaaggccgcgggggcaacggagaaaacccggaaccgcgacggcggcagcacccgacagcacaaaggcaagaaagaaaaagccccagccgcccgcccgca

SEQ ID NO: 259054 - RNA, 71 nt, Homo sapiens
gaagcggcccggaggagcagccggaccaagagaacgaccgaagaaaagcaacaaaccaacaacccaagaac

SEQ ID NO: 259055 - RNA, 58 nt, Homo sapiens
ggcgcccccgggcaaggcacaaaacagcgccacggccaccagccccaagcaccagccc

SEQ ID NO: 259056 - RNA, 76 nt, Homo sapiens
gacccaggggggaacagcagagacgcaacggaaaggcgcaggcagacgcaagccaaaccagaagagcacaaaacaa

SEQ ID NO: 259057 - RNA, 123 nt, Homo sapiens
ccggcggccccccgcgccgcagccgcccagaacccgaccaacaccagaacccagcgcccccagacccccgaaaaaaccaccggcgcaaagacgcaagaaacaggcaccaaacagagagaaaag

SEQ ID NO: 259058 - RNA, 57 nt, Homo sapiens
aaagcccagaacaccaggaaggccagagcaccaacagggacgcagcaacgggcagga

SEQ ID NO: 259059 - RNA, 102 nt, Homo sapiens
gcgcgcagggcggaagacagcggcgaggagaacgcccgcggacgacccgagaagcccgcaagaagacaacaagagggcacgcaccgaggaaacgacaaaaac

SEQ ID NO: 259060 - RNA, 104 nt, Homo sapiens
cagaaagccagccccagacacgggcgacacgaacaacaagcagaggaccaaagaaccaaaacgcgaaaggagcaaaggagaaggagaaagaagcacaaaaagca

SEQ ID NO: 259061 - RNA, 78 nt, Homo sapiens
cggggagggagccagaagcaacgaggcaccccgcaacccgcagagaggacccggcccgacggcagaagaaaacccaag

SEQ ID NO: 259062 - RNA, 122 nt, Homo sapiens
ggaggccgcggggacccagcgccaccacaacagcagcaacccgggcagcgccaagccagcacccgagaaggagacagggaagagaggagaagaaagcacaggaggagcaccgaaagaagaaa

SEQ ID NO: 259063 - RNA, 110 nt, Homo sapiens
ggagaagacgccaagcgacgagcgcacgccacccggcagccggcgacgcacacaccacgcagcacaagagggccagggaccaggggacgcccaagacggccacccgcgaa

SEQ ID NO: 259064 - RNA, 57 nt, Homo sapiens
agaagcggggcaccacgaaggaccgaagagaaaggcgaaggcgcgaaagggccagag

SEQ ID NO: 259065 - RNA, 123 nt, Homo sapiens
aggacccggcccggcccggcccggccccggcccgggcccggcccggcaccccaaaacagcaggcccagagaagaggggcaaggccaggcccgagagacagaggcagccgggggcaagcagccc

SEQ ID NO: 259066 - RNA, 87 nt, Homo sapiens
ggagggggcaagggaccagcaaggcggcagagcaaggggcacgcagaaggaccggccacgagaagaccccaacgacaaaagccgcag

SEQ ID NO: 259067 - RNA, 117 nt, Homo sapiens
cggcacagaaccacacaggccgcccccgccgaagagcacgccagcccagggagaaagcagaggcagcacaaagaggagagacacggcgaagcgagaacggggagggagccggaaagg

SEQ ID NO: 259068 - RNA, 44 nt, Homo sapiens
ccaacggggaggccaacggaagaagggccccgcacagcgcagcc

SEQ ID NO: 259069 - RNA, 97 nt, Homo sapiens
cccagacccggagcccagggaagcagccgaccagccgcggagccgggggcagaaagcaccgggaggaaagagagccacacgaagaacacggccaaag

SEQ ID NO: 259070 - RNA, 39 nt, Homo sapiens
agccacccccagcaggacgagaccgagcagagaagggag

SEQ ID NO: 259071 - RNA, 70 nt, Homo sapiens
gcggaagaagaagacaaagagggacagcaagaaaacagcgcgcagacaggacaaccagcggaggcacgac

SEQ ID NO: 259072 - RNA, 76 nt, Homo sapiens
ggagaccagcgagagcgcaacgcaaggcgacccgcggcgagagcccccccagagcgccagggcccgagaaggcggc

SEQ ID NO: 259073 - RNA, 83 nt, Homo sapiens
cccaggcgcgcccagccccgcagccagggcgaacccccgcagggcgcccaagcgcaaggaaaaggcaccagaccaggagggag

SEQ ID NO: 259074 - RNA, 80 nt, Homo sapiens
acggaccagagacacgccaagcagccagcccaggagagaaccaccgggaggaacgggccacaacacccggcaccagcggc

SEQ ID NO: 259075 - RNA, 82 nt, Homo sapiens
cggcggcgagcccccaaggcgcagcgggggaacagcagcggcaaggagaccgaggagcccaggaggaggaacccacagaccc

SEQ ID NO: 259076 - RNA, 86 nt, Homo sapiens
gagacgggacaagacagggcaaaggacagaccagagcgccacagcagccaaacggggacgcccagagagccgaagaaggaggcggc

SEQ ID NO: 259077 - RNA, 118 nt, Homo sapiens
cgaagcaggccaaggagacgaggacgccgagaagaccccaggccaccgcaccaaggcgcccaagaagcccagggaagagaacggaccgcagcagcaaacagaaggccgagcacccgga

SEQ ID NO: 259078 - RNA, 108 nt, Homo sapiens
gccacaccggagcggcgcggcacccggccgcggcccagcaccgggaggggccgaggaaaggagaaaagcgcaaccacgagggcgagaggaagggacaacaggaagcaa

SEQ ID NO: 259079 - RNA, 74 nt, Homo sapiens
ggcgccaccgacgccgcccaccggcacagcggaccccgcccgaagaacgaccgaagaaaagcaacaaaccaaca

SEQ ID NO: 259080 - RNA, 84 nt, Homo sapiens
gcaacaccggaggagggggcggccacggccaacgccgcgcccgcggagggaaaagggagggagcggcgggaccgggcgcagacg

SEQ ID NO: 259081 - RNA, 83 nt, Homo sapiens
acagcggaccaggagcggccgaggcgcgaccggacgacgagaacccaacaccgagccccagcagggccgcccaacaacaacgg

SEQ ID NO: 259082 - RNA, 63 nt, Homo sapiens
ccaacaggcggcgcccagggcgccaccgccgccgcagagcggaagaccaccaaaagcaggaaa

SEQ ID NO: 259083 - RNA, 108 nt, Homo sapiens
cgccacaaaggcagcagcacgggacgcacggcccggggggagacagccacgggaaggccaagacaaggggcgcagagcggggggacaggcgcaagaccggagaagcag

SEQ ID NO: 259084 - RNA, 82 nt, Homo sapiens
cgcaaagcgacaagagacagcagaagagcccggaacgccagagcggaaaggaagagaacgccggaagcgcaacaccaagaca

SEQ ID NO: 259085 - RNA, 123 nt, Homo sapiens
agggaagggacaacagccaggaaaggaacggagagaaacccaggaacgggaaggggcggaaaagccaccccacgccacggaccaaggcggcggcagcggcggcagcggcgggcgagggacagg

SEQ ID NO: 259086 - RNA, 79 nt, Homo sapiens
ccacccgacaggagccccgccgccgcgcaccgcccgccccgcaccgaacgggcgaaaaacgaagaaggaagacgcgacc

SEQ ID NO: 259087 - RNA, 79 nt, Homo sapiens
agaaggaagaggcggacggaggagcaggcgagaagagaagagacgaagaggagcagaaccagaagggacacacaggacg

SEQ ID NO: 259088 - RNA, 81 nt, Homo sapiens
ccgccgccgggccggggccccgcagcgacaacaggaggccggaagacccaaagcgaggacggcacagaaaagaacacacga

SEQ ID NO: 259089 - RNA, 119 nt, Homo sapiens
agagagagcccggggccagggcgaagcacgccaccagccacggaaagcagagcaaaagccccagcggccagagcacgacgagcccagggcgaggaagccgccgggaacccaaggaaaac

SEQ ID NO: 259090 - RNA, 96 nt, Homo sapiens
cgcaacgcccgccggggagccaagaggcaggcccgagggccccccggggccccccgggcaagggacgcaacccaccacgaagcggagagcaggaag

SEQ ID NO: 259091 - RNA, 99 nt, Homo sapiens
cagaaaagaaagcagggaaaaaagcagcaaacacgggacaaaaaccagaccagagcccaaaagcaaagcagggcagcaaagaacacaaaggcacgggag

SEQ ID NO: 259092 - RNA, 80 nt, Homo sapiens
ggacaccagacgaaaacagacacagccagccagccacacggcagaaaaagagacagagaggcgcaggcaagacccggaag

SEQ ID NO: 259093 - RNA, 118 nt, Homo sapiens
gaaaaaacaaggggcaccaaacgcggcaacgcccccgggacagcacgccccggaccccaaagcgacgacaagcgggccacgcggacgaggaggaccggggaccgccccgagggcgacg

SEQ ID NO: 259094 - RNA, 96 nt, Homo sapiens
aaacccaggaggagacccccggaaaaccccccccggccgagcgcaggaggagggaagaacgccacaaccgcccccagcccaacccgagcggacccc

SEQ ID NO: 259095 - RNA, 71 nt, Homo sapiens
gcaacgcacacaacagcagcaggaggcacaaaaagaacaaccagaaggaacgcagagaccgacggagagca

SEQ ID NO: 259096 - RNA, 71 nt, Homo sapiens
ggcacagcacccgggcgcggcggccagccgcaccgggacgacaccggggaccggacagcaaagggcacaag

SEQ ID NO: 259097 - RNA, 104 nt, Homo sapiens
ccccaccgaccgagcgggaggccacagcagccagccggcccgaggacaccgacaccagcagggggggccccagcccggccgaacgggcgcacgacacaaacaca

SEQ ID NO: 259098 - RNA, 126 nt, Homo sapiens
aaccggaagaaagagcagaggaaagaaaagaaacaccgaaccgccacccaggcccaagaagcaccaggagacaaagccacaaaaacaccagaaaaaccaagcagaaaaggagcggcagcaaaaagc

SEQ ID NO: 259099 - RNA, 88 nt, Homo sapiens
agaaaacccgggacccaccacccaggccccgacgccccgagggggggccccagcccggccgaacgggcgcacgacacaaacacaaccg

SEQ ID NO: 259100 - RNA, 122 nt, Homo sapiens
caggcaggagggacaagaccggaccagccagaggacgcgggccgaggagagcggaggagggggcgccccggcaaggccaccgcagaagccacaggagaccggaggccaacggcagaagccac

SEQ ID NO: 259101 - RNA, 58 nt, Homo sapiens
ggccgggcccacacagccgagagaccccagccgggcgggcggagcgccgacgagccga

SEQ ID NO: 259102 - RNA, 79 nt, Homo sapiens
gaccccacccgcgccgcgacccgccgagaggggaccccgggcaaggacggcacggcccgccgaaggcgagaaaggggaa

SEQ ID NO: 259103 - RNA, 67 nt, Homo sapiens
ggacacggcacgccacacccggggccccggcccggcgccagccaacgccccgaaacacggcggcagc

SEQ ID NO: 259104 - RNA, 94 nt, Homo sapiens
caaggcaccagggcggaccccggggccaggccggaagcagaccccagcagcaggccgggagagagcgcgaaccggaaaaagaacgacggaagaa

SEQ ID NO: 259105 - RNA, 76 nt, Homo sapiens
agaggacgcgggccgaggagagcggaggaggggggccacaaagcccagacaagcgcagaagcaacagaacccgaac

SEQ ID NO: 259106 - RNA, 81 nt, Homo sapiens
gacggcggagcaccgccccggcagaagcggcagcaaaaggaaggcgggggagaaggagaggaacaggaagaggccgaccac

SEQ ID NO: 259107 - RNA, 82 nt, Homo sapiens
gccagcgacagccgggaggagagaagaaggcccaggggacggggcgaccgggagcgagaagccgcagggcagccggggccca

SEQ ID NO: 259108 - RNA, 79 nt, Homo sapiens
ggccggcagagcagcaccccacaggacaacccgaggagccaccaggccggcaagaagccaacggagaaccaaggccaag

SEQ ID NO: 259109 - RNA, 78 nt, Homo sapiens
gcgagcaggcacgccgagcccaaccggcccggagcccaaggccccaggcagcccacaccagaagaccagagcagccca

SEQ ID NO: 259110 - RNA, 78 nt, Homo sapiens
cccaggccggggccaacgggaaaccgaacaagcgcgagaaggaacaaaccaggagaaaccgaacagaagaggcaccag

SEQ ID NO: 259111 - RNA, 93 nt, Homo sapiens
ggccagggcaagaaacaggaaaagccggcagagaacggccccgaaggagggaaacaagacaaaggaaaagcggagcggagaccagagacaagg

SEQ ID NO: 259112 - RNA, 76 nt, Homo sapiens
aacgccgcccacagggaaaacccaccaggcccagaccacccacccacccacacgacccaccggacaaaccggccga

SEQ ID NO: 259113 - RNA, 72 nt, Homo sapiens
gaaaaagggacggcagcggaggcagccgaagaagcaggaaggccggaggggaagacaggcgacaagcaaggg

SEQ ID NO: 259114 - RNA, 85 nt, Homo sapiens
cgaccgggcaccagcaggacccgaggccaggagccaggggcccagaaggaaagagcggaggacccggaccggacaacgcaacaca

SEQ ID NO: 259115 - RNA, 93 nt, Homo sapiens
aggcccgcccaccagcgcccgcccccgccccgcacaaggcggaacagaacgacaggagaacagaccagagcgaagaacaggaccacccaggca

SEQ ID NO: 259116 - RNA, 75 nt, Homo sapiens
cgaaaccaccaagagcaaggaagagaccaagcaccaagaaaacgccaaggaacggaaaccaagcacccaaaaggc

SEQ ID NO: 259117 - RNA, 84 nt, Homo sapiens
agcgggccaacagcaacagagagagccagccggagagaaaaagagaagaaccgaagacagagacaaggagagagacaaagacaa

SEQ ID NO: 259118 - RNA, 39 nt, Homo sapiens
cccggacagggcaggaaacaggggccgcaaggccaggcg

SEQ ID NO: 259119 - RNA, 110 nt, Homo sapiens
caagggagaaacggcgcagcagagcgagaccgccaacaggacaccgaagccaaccgaccacccggcacaacgagcaccccacgcaacacccgaccaggaccaacacaacc

SEQ ID NO: 259120 - RNA, 84 nt, Homo sapiens
gcgcggagccaggcgagcagaggccgcgagcgacgcggcgccgagccgaccgccgggcgaagggggggcagagccgggccccag

SEQ ID NO: 259121 - RNA, 38 nt, Homo sapiens
acgcggggaagaagcaagggaagcggacagcaagacag

SEQ ID NO: 259122 - RNA, 80 nt, Homo sapiens
gcagaccgcaccccccccaacaggcgcagcaagaggacaacacagccgagccgcggggacaaacccacaagcgaaagaac

SEQ ID NO: 259123 - RNA, 93 nt, Homo sapiens
gcccgggaccagcccggaacccgcaccaagccgcccacacgccaaccggccagaggacgagggaacccagccaagccccggccggggggaacg

SEQ ID NO: 259124 - RNA, 68 nt, Homo sapiens
cagacggagggagggagagcccacgacagaacgaaaagaaaggaccccaggccacgagggcacagaac

SEQ ID NO: 259125 - RNA, 76 nt, Homo sapiens
acgcagcgaagccacagaccccagaaacgggcaagcgcgcaaacccagaagacaacgagccagcccgcaccacacg

SEQ ID NO: 259126 - RNA, 95 nt, Homo sapiens
gcgccccaccgaccgagcgggaggccacagcagccagccggcccgaggacaccgacaccagcaggccaccagcccccgggccaagagcagcacgg

SEQ ID NO: 259127 - RNA, 93 nt, Homo sapiens
caggaaaacagagaccaccacagaaacagaaggaggccggccgacacaaacagcaccaaggagacagacgagccggcgcagaaaagaaggagc

SEQ ID NO: 259128 - RNA, 79 nt, Homo sapiens
agggcgcggggagcccgcacgagcagcgaacaggaacccgcccacgccagcgaagccgacaggaccaacgacaggcgcc

SEQ ID NO: 259129 - RNA, 104 nt, Homo sapiens
ggaagacgcacccccgggggaaaagagacaccgacaagacaccacggacgagagacaaacgccgaaggagcccaaagggcacgcaaaaagaacagaggaaccca

SEQ ID NO: 259130 - RNA, 72 nt, Homo sapiens
cggggaccccggccgggggcggcggccgggggcccagcccgggcggcgcggccagaccggaaggccaaaaca

SEQ ID NO: 259131 - RNA, 81 nt, Homo sapiens
gacaagaccggaccagccagaggacgcgggccgaggagagcggaggagggggacgcccccgggccaaacggcagcaaaaac

SEQ ID NO: 259132 - RNA, 87 nt, Homo sapiens
accgccccagcgccaccaaagaccgcgacgccaggcccgggcccgccggccacaccacacgcccccgccgcccacaacgccggagca

SEQ ID NO: 259133 - RNA, 117 nt, Homo sapiens
gaaggagccgacgagaaaaacaaggagcggacacgagccgagggaggggaaaggcgcaggggcccacgagacgcgaacaaacgccgcgccgccagaagaacagaccgggagaccagc

SEQ ID NO: 259134 - RNA, 77 nt, Homo sapiens
aagggaggcggcggccccaaaaggcagagggccagacccccaacaaagccaaaggagaaacggacccagcaggggca

SEQ ID NO: 259135 - RNA, 45 nt, Homo sapiens
gcagccgagcggggccggccacaggcaggagcggcgcaccgggcg

SEQ ID NO: 259136 - RNA, 81 nt, Homo sapiens
gccgcagcgcgaggccgggccgggggagaccgcgcgagccaggaagccacccacaagcggagacccccaggaggcgaaggg

SEQ ID NO: 259137 - RNA, 107 nt, Homo sapiens
gaggagggagcgaggaaccaccggacgaagacagcaaggagacccgccaaagccgccgggcaagagcacacgggcacgaggcaagccgagccccaacaccccgcggg

SEQ ID NO: 259138 - RNA, 65 nt, Homo sapiens
ccggaccccccgcagccggggacgcagacgaaggaaacaggcagagaggacagacgcgcgcagcc

SEQ ID NO: 259139 - RNA, 63 nt, Homo sapiens
gggccccacggacaccccacccagacccccacccaaggagagagagggaaagggccccaagag

SEQ ID NO: 259140 - RNA, 103 nt, Homo sapiens
gcccggagcccggcgcccccgcaagaggacggcgccggcagccgggaaaagccgggccacagaagcaccaccacaagccacaccaacaaacgaccccgaccac

SEQ ID NO: 259141 - RNA, 115 nt, Homo sapiens
ggggaagcagcggagcagccggaggacgcggagcccaagaaacgggcagccaggcccccacagcccgcagaacgcaaggagggacaggacggaaggagcggaggaagacacaaga

SEQ ID NO: 259142 - RNA, 66 nt, Homo sapiens
aacaagcggcaggaagcccgcgcgcaacagccaggccgggcccaagaagcacgaagcgggggcagc

SEQ ID NO: 259143 - RNA, 81 nt, Homo sapiens
gcgcggacgacacgggccgcgacagcagccacgaggcgagccagagccgcagcccacacggggacagcacggaaaagagcc

SEQ ID NO: 259144 - RNA, 70 nt, Homo sapiens
acagccaaaggaaaagcaccaagggcaccaaacacccagaacaacaaagagggaccaagaaaggcccagg

SEQ ID NO: 259145 - RNA, 82 nt, Homo sapiens
acaccccgcagaaaggccggcacagagacaaagcaggaggacacaagaagggaggaaaggcggacccaggaaccaccacggg

SEQ ID NO: 259146 - RNA, 81 nt, Homo sapiens
gcggcgccgccacccccccccagcaggcgaagggagggccgccccaaccgacgcaccagccggaggaggagggacagggcc

SEQ ID NO: 259147 - RNA, 84 nt, Homo sapiens
gccgcaccaccaacgcggccgacaacagccggcgccgccacgggaaaggagagacaagaggaagaacaagaaaggaaaagggag

SEQ ID NO: 259148 - RNA, 72 nt, Homo sapiens
agcacaccaggcgaaggagccggcggaacaccaccgagcacgacgggccaaaaggaagcccacgacaagaga

SEQ ID NO: 259149 - RNA, 101 nt, Homo sapiens
gccaagcccagacaagccccagggaagccacagcaccccagcacccaggcaaaccgacaccagcgacacaagcgcgagggaaccacagaggacaggcgagg

SEQ ID NO: 259150 - RNA, 73 nt, Homo sapiens
acgcaacaaccagcagcacagagggcggagaacggaaaagcaccaggaagcagagaggaccgcagaagggaag

SEQ ID NO: 259151 - RNA, 76 nt, Homo sapiens
ggacgccagcccgagacccagcaggaccgggccagggcaggacaaggacaagggcgagaggacagccgacggacca

SEQ ID NO: 259152 - RNA, 75 nt, Homo sapiens
cacggacaccacacacacacagcggacagcggagacagccggaagaaacgccaaaagaaaccgggcaaaggacac

SEQ ID NO: 259153 - RNA, 102 nt, Homo sapiens
gggcagaaagaaagcaggaccagggggagggaccaagaacgcgccccggcaaggccaccgcagaagccacaggagaccggaggccaacggcagaagccacca

SEQ ID NO: 259154 - RNA, 81 nt, Homo sapiens
ccaggcgggccacaaggcggagcacgacgaagacacgcacacacaggggacaagagaccaacgaagaaccccccaagaagg

SEQ ID NO: 259155 - RNA, 82 nt, Homo sapiens
ggggcgagccggagcgaccccggcaggaaagaaagggcgggcaagaaggaaaagaagcaacaaaacgacggaggagagggac

SEQ ID NO: 259156 - RNA, 81 nt, Homo sapiens
cgaagacaaaacccgaggcccgggaggagccaacaagcgcacggagccccaaggaaggggcagacaaccaggaccccacag

SEQ ID NO: 259157 - RNA, 116 nt, Homo sapiens
aaaggggcacccagacccaggcacccacccgccccaccgcagcccaccccagagaaagaccagaaaggaagcacgcgcgcggacaagaccagaaagaaaagaaccaaggagcggag

SEQ ID NO: 259158 - RNA, 75 nt, Homo sapiens
agacccaggcgggacagagggagccaggcagagggcggagaacggaaaagcaccaggaagcagagaggaccgcag

SEQ ID NO: 259159 - RNA, 94 nt, Homo sapiens
gggcccgcgcggccagagcccaggagcgaagcccggacgcaaccgagggcacacaggcccgagcacaaacacaagaaacgcacgcccgccagcg

SEQ ID NO: 259160 - RNA, 108 nt, Homo sapiens
gcgacgcagcaacgcagaggagaaggagaggcgcggcgaaacagcaagaacgccggcagcccagggccgaaaagaaaacaggagaaccacccgccaacagcaagcgac

SEQ ID NO: 259161 - RNA, 114 nt, Homo sapiens
cccccgacgccccgccgccgccgaggaggcgagcagccgggagacaccgccaccgccaggcacagccccagagagcaaacgccagggccaacaaaagcagcaggcaggaccaga

SEQ ID NO: 259162 - RNA, 80 nt, Homo sapiens
accggcacaccgcggggccgaaaacaacgacaacgagcacagagcggacgcaaaagacaacccagggaaggagcagccca

SEQ ID NO: 259163 - RNA, 71 nt, Homo sapiens
gacaccaaaaagcaaacggaccagaccgaccaccaaaagcgaagccaacccaccgccaccaccccaccaga

SEQ ID NO: 259164 - RNA, 111 nt, Homo sapiens
cccccgaggacgcggggacagaggaggcggggggccgggaggcggagaaaagggaaaggacagaagccacaaaacacggcacgccagacacaacgagggccagcccagcgg

SEQ ID NO: 259165 - RNA, 72 nt, Homo sapiens
gaaccacacacaccacaggaagccagaagaagacggcacgggacccccagcacaggcagcaggccgggagag

SEQ ID NO: 259166 - RNA, 42 nt, Homo sapiens
agaagaccaggaggcgggccaaggggcggagaacggaaaagc

SEQ ID NO: 259167 - RNA, 76 nt, Homo sapiens
ggagaggcgccggggccgcacagcacggcaggaccccacccccgacagcacgggaaggagggggaccgaccgaaca

SEQ ID NO: 259168 - RNA, 79 nt, Homo sapiens
cggcggcacggcgccgaccagcaccaggggaagcgggacaacggggggcaagacggacgagacgcgcgggcagaggcag

SEQ ID NO: 259169 - RNA, 139 nt, Homo sapiens
ggcccacagccagcggaggccggggccagccccaccacgcccccaccacagcccggacgcggaaggagaacgaccgccagaagagaagaggaaggagaaaaacaaaaaagaggaggcaacgcgagccaagccaaccaac

SEQ ID NO: 259170 - RNA, 91 nt, Homo sapiens
cgggaggccacagcagccagccggcccgaggacaccgacaccagcagagcgaagaagcaggggagaggccgagcgaagaaccagcggccaa

SEQ ID NO: 259171 - DNA, 26 bp, Homo sapiens
tgagtagctgaaactacaggatgctt

SEQ ID NO: 259172 - DNA, 24 bp, Homo sapiens
tcagtgatataccatttggcgtta

SEQ ID NO: 259173 - DNA, 20 bp, Homo sapiens
cacagtgggggtgtgcaaac

SEQ ID NO: 259174 - DNA, 18 bp, Homo sapiens
cgagaccgtgaccgagag

SEQ ID NO: 259175 - DNA, 24 bp, Homo sapiens
tgagtagctgggattgcagtacca

SEQ ID NO: 259176 - DNA, 22 bp, Homo sapiens
tccggcttttcagggacattaa

SEQ ID NO: 259177 - DNA, 18 bp, Homo sapiens
cgagaccgtgaccgagag

SEQ ID NO: 259178 - DNA, 18 bp, Homo sapiens
cgagaccgtgaccgagag

SEQ ID NO: 259179 - DNA, 23 bp, Homo sapiens
cctccccaaccaagctttctgta

SEQ ID NO: 259180 - DNA, 26 bp, Homo sapiens
ccttcaatgcctttaatatttccacc

SEQ ID NO: 259181 - DNA, 21 bp, Homo sapiens
gatgttcgaacctttctgcgg

SEQ ID NO: 259182 - DNA, 22 bp, Homo sapiens
acgaccttgtgatggaacgaaa
